United States Patent Application Publication US 2023/0390346 A1 - sequence listing, part 16

SEQ ID NO: 262 - DNA, 3968902 bp, Bacillus amyloliquefaciens (residues 1,984,452-3,968,902 of 3,968,902)
ttcgatcattaatccgagcgcaatccctaaatagcccatacttgtcagccaggataatatttcactaataaaattgcccacactgttcacaacctctttatctttttacccaattatatgactgattgacaagcaaaatggttacaaattattttttaacgcacgatttttcagattctctttttaacacctcttctaaataagctaaaagtttcggtctcatttcttcccgcagaagcccgatctccgtgccggccttaaaacagccgaacttatctcctatatcaaaccggcttccttcaagctcccgcgcgtaaatgcttcgggtgcggcacacttcgcgcagcgcgtctgtcaattggatttcattgcccgcgcctcttccgatcgtcttcagcgttttaaaaatagcaggggttaatatgtagcggcccatcacggcaatatgagagggcgccttttcaacagccggcttctcaatcagatcctcaacctggtacacatgaccgctctgccgccccgtctgtataataccatatttgctgacatcagcaggatcgacgggctgtacgccgaccgtttctgtgccgtgttggttatagacgtctatgagctgtgaaagagcgggagtgtcagataccataatatcatcacctaagagaacggcaaaaggctcatctccgataaaatgctccgcacacagcaccgcatgtcctaatccgagcggttctttctgacggatgtaatgaatattggccaaatcggcaatccgttgcatttccttcagcatctctgtcttgcctttttcctcaagattgaattccaactccgccgaccggtcaaaatgatcttcaatcgagcgtttgtttctccctgtaataatcaatatatcttcaattcctgatgctgcggcctcttcgacaatatattggatggccggtttgtcgacaatcggcagcatttctttcggctgcgcctttgtcgccggcagaaatctcgttcctaaacctgctgcgggaatgaccgcttttctcactttttttctcattcatcttcactcctgatcctgtatgtttttcagcgaatctccaaatacccagattcggtttccgataaaattcatcatcattccgccgatagtggcggcgaacttactcaccaatagcgaacagccgcctttttgaaacacgtaaagcagcaaaaaggtgattcccgacgcagcaagattaatcatgagaaatcgcatgatctctttcccgtcagccttgcgttttacacgaaacgtccacttccggttccatacatagctgttgatgatccctgccgaataggagcagatctgcgccggaagataggggacatgacaagcggcgagaagaaagaagacaccaaaatcgatcagcgtattgccgacgcctacagtgcaaaaacggcctgctgtctttactttttctttcagcataacggtgacctcccctcataataagatgcggttcgctgtcctatttgttgatatggattactttagcggacagtgttgaataaacaattactaaaatatgaacaaaacatgaaaacgtaatgagactttgcaaaacttattaagttaacagtttgatagtttaggttgacatattccgcgaagggcactaatattctgtataagtgttaaccttaaatttattttggttaacattaattttcaaagtaagagaaaggaggggaatatatgcgggaagaaacctattacagcgtcagaatgagagcttcccgaaacgccccccatgagcagggcggaaaacacatttccggcggagaacggctcatcacttacagcggtttacaggaagcggtagatggcttattacataaaggcttctcgcactcaagagggatacctgattttatgcagattcagcttgaaagtattaatgaaccgatcgaaacgatccgccctttgccggttgctttccatcaaacagacacgccggaaaaaggacaagcaatcgcccgcaagcttctgcaaaaggcggggattcccccgcacatgatagagaaagcgtacgaaaacattgcggaatatgcagaagcaagaggagcggtcctgtttgatatccgggcaggaaaacgcattgacggcagaggaaatagaggtgtgcgggtatcacgagtggattggccgtcacatgattttcaaaaatggacttttacgcacaacatgccggaaaattcacgaataaaagaagcacatgccatcgcggcaaaagtttgcgcacatccggggattattgccgaattgtgctggtcagatgaccctgattacataacaggctacgttgccgcaaagaagctgggatatcagcggattgccaagatgaagaatgccggagatgaaagcggctgccggattttctttacagaaggctcaatagatacagagagctgtatccattttttagagaagcagcctgtattcattcagcgggaggagaacatatgaaacaatcaatgattgaaaaaagcaaacagcatctttggctgcccttcacacaaatgaaagattacgatgaagatccgttaatcattgaaagcggaaacgggatcatgctgaaagatatcagcggcaaagaatattatgacggcttttcttcagtatggcttaatgtacacggccaccgcaaaaaagaaatggatgaagcgattcaaaaacagcttgaaaaaatcgctcattcgactttgctgggtatgacgaacgttcccgcaacagaacttgccgagatgctgacaggcatcacaccggaaaagctgacacgcgttttttattccgacagcggagcggaagcaatggaaatcgctctgaaaatggcctttcaatactggaaaaacatagggagacccgagaaacagacgtttatttctatgcagaacggctatcacggcgatacgatcggagccgtcagcgtcggctccattgaactcttccaccatgtgtacggcccgctgatgtttgaaagctacaaagccccgattccgtatgtatacagatctgaaagcggcgaccccgtacagtgccgggatgaatgccttcacgcgctcgaacagctgcttgcaaagcatcacgaagagattgccgcacttacgattgaatcgatggtgcaaggcgcatcagggatgatcgtcatgcctgaaggctttctggcaggcgtacgaaagctgtgtacggcatatgatgtgttaatgatcgttgacgaagtggcgacggggttcggccgcaccggaaaaatgtttgcctgtgagcatgaaaatgtccagccggacttgatggcggcagggaaaggcattacgggaggctatttgccgatcgctgtgacgtttgccacagaagccatttatgaagccttctacgatgactacgacaaaatgaaaacatttttccacggccattcctatacaggaaatcagcttggctgtgccgcggcaattgaaaatctgcgtttattcgaatcagagtgcatcgttgaacaagtcgccgaaaaatcaaaaacggcagcggaatttcttcatgatctgaagcagctccctcatgtcggcgatgtccgccagctcggtttcatgtgcggcatagagcttgtgcaggataaggggacaaaacagccttatccgcctgagaagcggatgggatacaaggtgtccttgaaaatgagagagcttggtatgctgacacggccgctcggagacgtcatcgcctttctgccgccgcttgccagcacaaccgatcagttacaagccatgatctccattatgaaagaagcgatagccgaggtgaccggccgtggattttgacggatggctcctcggaaggctcgatgcggtgaaaagagacgggctgtatcggatgctgcgaacacaggaaaccgctcttaaaaccaaggggcaaaagcggcagacctgggcatccaatgactatttaggcctgtcaaaagatgaacggctgatcacagccgcgcaaacagcgctgagccggttcggagcgggaagcggcggctcacggttaacgacaggaaatactgtgtggcacgaaaaacttgaacaaacaatcgcggactttaaacagacggaagcggctttattattttcaagcggttacttggcgaatatcggcgtgcttgcctcactgcctcaaaaaggcgatgtcattttaagcgatcaactgaaccatgcgagcattgttgacggctgccgtttatcaaaagcggaaaccatcgtgtaccgccatattgatatggatgatcttgagaaaaaactcgcctccgtccagactcggaaacgccgctttatcgtcacggacggggtcttcagcatggacggcaccatcgcgcctcttgaccgcataatggcgcttgcaaagcagtaccaggcatttgtgatagcagatgacgcgcatgcaaccggtgtactcggggaaaacggcggaggaaccagtgactatttcggtgtttgtcctgatgttgtcatcggcacattaagcaaagcggtcggaacggaaggcggttttgccgcgggatcaaacattttcattgattttttgctgaatcaggcgcggacgtttatttttcagacggccctcccgccgtcaatttgtgcggcttcgcatacggcatttgacatcatttcagatatgcacgataagcgccgggagctgcagtcgtctgtcaaaaagataaaaacgcgtctggccgatatgggctttaccgtaagaggcggagatacaccgattatccccgttatcatcggtgatgcaaaaacagcggtttcagccgctgcactgctggagaaaaagggaatctgcgccccggccatccgcccgcccgccgttccggaaggcgaaagcagaatcaggctgaccgttacggcggatcgcagcttacaggatatagacgagctgacagaagcatttgattccattagaaaagagctgaatataaacaaatgagaagtttttttgtcacaggaacagataccggcgtcggaaaaaccatcgtttcttgcggtcttgccgcggcattccggcagaaacaggcggatatcggagtgtttaagccgtttttaagcggtgtgccgcggactcatccggaaagtgacacctcgctcttgaaagacatgtcacaaaccgcactgtctcatgaagaaatcacgccatttgaatggaaagagccgcttgcgccgtacacggccgccatgcttgaggggaaatccgtgagcatggcggatgtcatggcccactggagtaagatcaaaaatcgtcatgagtgtttcatcgttgagggggcaggcggcatttccgtcccgcttggtgaaaattacttagtcagtgatctgataaaagccatggaattgccggcggtgattgtcaccaggcctgatctcggaaccatcaaccacacatatttaaccgttgaatatgcgaaaaacatggggatagaggttctcggcattattatcaacggcgtaaggagcaggccggggctggacgaaaagacaaacccgagcatgattgaaatattatgcaaagttccgattttgggaatcacaccgaagctggatcacgtttcatcggaaaacattcaacacatgattgagaaacatatagatgtttcctctttcatgaatctgacacaaatggggagataaacatgaatcaatggatggatcttgcagagagagtgctggacggggcggaagtaacgaatcaagaagcgctggccattttaaattgtcctgatgaggatcttttattgctgatgcatgccgcttttcatatcagaaaacgattttacggaaaaaaagtaaagctgaatatgattatgaatgccaaatcaggcctgtgtccggaaaattgcgggtactgttcacaatcttcaatatcaaaagcgccgattgagtcttaccggatggtggataagcatatattgctaaagggggcaaaacgcgcccacgacctgaatatagggacatactgtatcgtcgccagcgggcggggaccgtcaaacagagaagtagatcaagttgttgatgctgtcaaagaaattaaagaaacgtacggtttaaaaatctgcgcatgtctcggtctgctgaagccggaacaggcagagcggctgaaacaggcaggagtagaccggtacaatcataacatcaatacatcacagaggaatcactcaaacattacgacctcccacacgtatgacgacagggtcaatacagtggaaacggcgaaacaatcggggatgtcaccttgttctggtgtcatcgtcggcatgaaagagacgaaacaggacgtcattgatatggcgaacagcttaaaagcgcttgacgccgacagcatcccggttaattttctgcatgcgattgacggaactccgttagaaggggtaagcgaattacatccggtgtattgcctgaaagtgctcgccttgttccgttttatcaatccgtcaaaagaaatccgtatctcaggaggccgggaagtcaaccttcgttcgctacagccgctgggactttacgccgcaaattcgattttcgtcggagattacttaacgacagcagggcagcaagaaacagaggatcatcaaatgctccatgatttaggttttgaagtcgaatccgttgaagaaatgaaagccggcctgcaatccgcctgcaatacggaggtataagatgacggcggacctatcgattgcacatccgtctctccatgcggattcggatttttggaatgacccttacccgttttatgacaaactgcgatccattgatcctgtttataaaggaaccgtattaaaatatccgggctggtatgtcaccgggtacaaagaagcggcagcgattttgaaagacattcggtttaaaaaccgcattcctcttccggaagcttcaacgaaatatcaaaatctatcgcatatccagcacgatatgctgttatttaaaaatcaatcagaccataagcggatgcggatgcttatcggtaaagaatttaccgcaaagacggcggaatcacttcgcccttgtataaaagaaacggttcatgacttgttggatcaagtccaaatcaaaaaaaccgcggaccttgtttcagagtttgcctttccattggcaagccttatcattgcggagatactcggagtgccgaaagaggagagatatcaattcagacaatggacggcagacgtcatccaggccattgatcttacccgatcaagaaagacgttagtcagagcaagcgacaccgcaggcaggctgacgtcatatttcaaagatttgattcacaagcggaaagcgcaccctcagcaagacttgatcagcaggtttattatggaggaacagctttcaaaagaggaagtgctcgcgacatgtatcttacttgtcatagccggacacgagacgacggtaaacctcataagcaacggtgtgtttactttattgaaacaccctgaacagcttagcgcactgagagaaaacccctcgcttattgaaactgcagttgaggaatgtctgcgctacgacagccccgcgcagctgacggcacgcaccgcctcagaagactgcgaaataaatgggaagaccataaaaaaaggagagcaggtatatatccttttaggggcagccaatcgcgatccaagcatattcgatcaacctcacaaaatggatatccaaagaaagccgaacccgcatcttgcattcggaaagaacgcccatttttgcataggctcctcattagcgcgcatcgaagcacaaattgcaattcttacactgtttgagcggatgcctaagcttcggctggctgcacaccgccttgaataccgcaagctcattggttttaggtcgctcaaagagctcccggttgtcattggctgaatgaccatgcaggagggccggattttatcggttcctcttgcaggaaataaatgaaagaaaaaagaatacatatttataaagcaaaaatcctctctgatccatctcactatccctaaaaaaactcactgctcagccaatcaatctaatacagcaagagtctccctttctttcgccaaaacggaacattcaccatgatgcacattttttcagcctcagaaacggtgcaaaaccggcatgttttttgctttattttctcgatttttttgtaagcgcttactaatattaagcagaaaagagggggatttgtggacattgttattattttattggcattaggcatgctgatgtttgcggcttaccggggcttttcagtcattttattcgccccgatttgtgcgctgtttgccgtgctcctgacagatccaagcttcgtacttcctttcttctcgaatatatttatggagaagatggtaggatttattaagctgtattttcccgtatttcttttaggggccgtttttggcaaggttgttgaaatatccgggctcgctgagtcgattgcaaaaacaatcgtcagacttgtgggagcaaaaagagccattctcgccatcgtcttaatgggtgcgattttaacgtacagcggcgtcagtctcttcgtagcggtgtttgccatttatccgtttgctaaaaacctatttattaaagctgatattcccaagcgtctgatacccggtacgattgcattgggcgcctttacatttacaatggatgcgcttcccggcacaccgcaaattcaaaatgtcattccgaccgctttttttaaaacaaacatttatgccgctccctggctcggactgattggtgcagcatttgtgcttacggccggaatgatttatttagaatcccggcgcaaaaaagcggccaatgccggagaaggctatgctggatttcaatctgaagtttccgctgcagaggaatcctcaggtctggctaatgaaacacatacgcctgttttaccgcaggaggcagaacccagccccgcgcggcaagtgctcgcctttgttccgcttatccttgtgggagtcatgaacaaatgcttcacgatgtggctcccgcattggtaccctgacggatttgattttgcgccgctcggcttagaagcgttcgggaagattgacctttcctccgtcacggcgatctggtcagtagaactcgcactgttcatcggaatcatgaccacgattttgttcgattggaaaaaagtcctcttcaatttgaaagaaggactgaatgagggcatcgggggtgccttgctggcgtcgatgaatacaggagccgaatacggatttggcggcatcattgcggcgcttcccggctttaaaatggtcagcagcggcatatcgcagacgtttacagatccgctcgtcaacggagcggtgacgaccactgcgcttgccgggattacaggatcggcatcaggaggaatgggcatcgctttaagcacgatgtcagcagcgtatacagaagcaatcaatacattccacatcccgccggaggtcatgcaccgggtgatctcgatggcctccggcgggatggacactcttccgcataatggcgccgtcattacgctgctcgcggtcaccgggttgacccaccgccaatcctacagggatatctttgccattaccgtcattaaaacagccgctgtgtttgtcatcatcgccatttacagtctgacgggccttgtgtagccaaaatagaaaggggaaacgaatatgggaaaaggaaaagtgatggactcttatcaagatgctgctgcactgatcaaggacggagacaccctcatcgcaggaggcttcggcctgtgcggcattccggaacaattaattctcgcgatcagggacagcggcgtaaaaaacttgaccgttgtcagtaataactgcggtgttgatgattgggggttaggcctcttgcttgcaaaccggcagatcaaaaaaatggtcgcatcctatgtgggagaaaacaaaacctttgaacggcagtttttaagcggagagctggaagtcgaattggtgccccaaggaacgctcgcagaaagaattcgcgcgggaggggcgggcattccggcgttttacacacctgcgggcgtcggaacatcagtagccgagggaaaagaacataagacatttgacggacgcacctatcttctggagaaagggattacagggaacgccgccatcgtaaaggcctggaaagccgatcctctgggcaacctgatgttcagaaagacggcgagaaatttcaatccgctcgctgcaatggcaggcaaagtgacgattgcagaggctgaagaaatcgtcgatgccggagagcttgatccggatcaaattcatacgccgggtatttttgtgcagcacgtgctgctcggcgggattcatgaaaaacggattgaacgccgcaccgtccggcaagcatgataaaggaggctgacagaatgagagatagcagaaaacgaatgatcaaacgggctgtaaaggaaattaaggacggaatgaatgtgaacttggggatagggatgccgacgcttgtagccaatgagataccgaatgattataacgtcctgcttcagtctgaaaacggcttgctcgggatcgggccttatccggcggaaggaacggaggaccccgatctgatcaacgcgggaaaagaaaccatcaccgaagtaaagggagcctcgtattttgacagtgccgaatcctttgccatgattcgcggcggccacattgatgtagcgatcctcggcgggatggaagtgtccgaacggggagatttggcgaactggatgatcccaggaaaaatgatcaaaggaatgggcggcgccatggacttggtccacggagcaaaacggattattgtcattatggagcacgttaataaatatggggaatctaaagtgagaacggaatgtacgctgcctttaaccggcaggcaggtggtcgatcggctgatcacagatttggctgtattcgattttcatgatggccgtatgacgctcaccgaactgcaggaaggtgtaacaatggaggaggtctttgagaaaacagaaggtcattttactgtcagccagtcgttaaaaaacggggtcagaccaaaatgaggaggtgccgtcatgcattcattgcttattgaaaaaacagccgttgtaacaggagcagccggaggaatcgggcttgaaatcgcaaaagaattcgcccgtgaaggagcagccgtcatcatctctgatgtaaacgaacaagcggggaaagaagcggcggcaagactgaaagatgaaggctgtgaagcagtcagcatcacatgcgatgtaacaaatgaaaagcaagtggccgatatgctgcagacggtcgagaaacaattcggacgtctcgatatccttgtgaataatgcgggcattcagcatgtcgcgcccatcgaggaatttcccaccgaacagtttgaacggctcattcgtctcatgctgactgcgccatttatcgcaatgaagcatgcatttcccattatgaaaaaacagcaattcggtcgaatcattaatatggcgtctgtcaacggactgatcggttttcacgggaaagcggcatataacagcgccaagcacggcgtcatcggtttaacgaaagtcggcgcacttgaaggcgcggctgacggcattaccgtcaatgcgctttgtccgggatatgtggacactcagcttgtccgcaatcagttaaaggacatttccgcaacaaggaatgtaccgtacgagcgggtgcttgaggacgtcatctttccgctcgttccccaaaaacggctgctgtcagtgaaggaaatcgctgattacgccgtatttttggccagcgacaaagcaaaaggggtcacaggtcaggccgtagtcatggatggcgggtataccgctcaatagttcttatactttttaaaaaagcagccgctctgaacggctgtttttttatgcctgaaaaccttgttcactcaataggccgatttactgcgtcaatcggtatccgggcagggtcattcgcatgttctgcggcgtatttcgtccttgcggattttccccatccagatccatctcttgcgccacatttataaacaagcgcaatcagtttacaatccttcacagatatacaaatgattttttacaataaacagaaaatatgtaatttctgacacaataatgccaatagccctaaaacatatgaaacatgaagagcgcgtcctaagtgaagaagagccggtaacaggctccaccccggctttcatcatctctctttaagactgattttcggtgaaacccccatgttttattttatgaataaatatatctaattcgtttgtgaaaacgaacaataactcctccgaaagtattctatacacatttgttataatcatgctaggatgttagataaagggatattttgtaggatattgtatcccctgttcaatatgatcggaggaatctcatgaacaatcttgcctttttatttcctggacaagggtctcaatttgtaggaatgggcaaacaattttggaatgattttgtgctcgcaaagagattgtttgaagaagcgagcgatgcgatctccttggatgtaaaaaaactgtgttttaacggagatatgaatgaattgacaaagacaatgaacgcgcagcccgctattttaacggtcagtgtgattgcttttcaagtgtatatgcaggaaataggggtgaagccccgcttcctggcaggccatagcttaggcgaatattcagcgcttgtctgtgccggcgccctttcttttcaggatgccgttacacttgtaagggagcggggaattcttatgcaaaatgcggatccccatcagcaggggacgatggccgccgtgacacagctctctctccaaaccttgcaggaaatatgttcgaaagtatcgacggaagactttccggcaggtgtagcctgcatgaattcagaacagcagcatgtgatttccggacaccggcaagctgtggaacgtgtcatcaagatggcggaggaaaagggtgcggcatacacttatttgaatgtcagtgcgccttttcacagttcgatgatacgatcagcctccgaacaattccagactgtattacaccggtattccttccgggatgccgcatggccgatcatttcaaatgtcaccgcgcgcccttacagcagcggaaattcgatcagcgaacatctcaagcagcacatgacgatgccggttagatggacagaatcgatgcattacttgcttttacatggagtcacagaagtcatcgaaatgggtccgaacaatgtcttagccggtctgctgagaaaaacaacgaatcacattgtaccttatcccttaggacagacatctgatgttcccccgctttccaattcaacggaaagaaagaaacatattgtccatttacgcaaaaaacaactgaataaattgatgattcaatccgtcattgcgcgaaattacaacaaggattcagcggcttattccaatatgacgacgccattatttacgcaaatccaagagctgaaagagagaatgaaaaggcatgaagacgtgctttcagaacaagaactcgaacattcgatccatttatgcaaattaatttgtgaagctaaacagcttccggcttgggaagaattgcggattttaaaataaagcgcccaggaggggacctatgtataccagtcaattccaaaccttagtagatgtcattcgggaaagaagcagtatctctgatcgcgggatccgttttatcgaatccgataaaaacgagacggttgtctcttaccgccaattgtttgaagaggcgcaagggtatcttggctatttacagcatctcggcattaagccgaagcaggaaattgtatttcaaatccaagaaaacaaatcatttgtcgttgctttttgggcttgtatattaggaggaatgatcccggttccggtcagtatcggagaagatgatgaccataaactgaaggtctggcgcatttggaatatattaaatcatccctttctgattgcctctgaaaaagtattggacaaaataaagaaatacgctgcagaacacgatttacaggatttccatcatcaattaaacgaaaaatctgacatcattcaagatcaaacctacgattaccccgcttcattttatgaacctgatgcggatgaactcgcctttatccaattttcttccggatcgacaggagacccaaaaggagtcatgttaacgcatcacaacttaatacataacacgtgcgccattgggactgccctacacgttcattcgaaagactctttcttatcatggatgcctttaacgcatgatatggggctcatcgcctgccaccttgttcccttcataaccggaatcaatcaaaatctaatgcctacagagttatttattcgcagacctattctttggatgaaaaaagctcatgaacataaagccagtattctatcatctcctaatttcgggtacaactacttccttaaatttctgaaaaacgaaccagactgggatttatcccacatcaaggtcatcgcaaacggtgcagaaccgatattgccggagctgtgtgacgaatttttgaaaagatgcgcagcattcaatctgaaaagatccgccattttgaatgtttacggtttagcggaagcttcggttggcgcagcgttctctaaaataggtaaagaattcgttcccgtttatttgcatcgtgactatttaaatcttggtgaaagagctgtaaaagtcagcaaagaggaccaaaattgcgcttcattcgttgaggtgggacaacctattgactattgtcagcttcggatctccgatgaaacaaatgaaagagtagaagacggaatcatcggccatatccacatcaaaggagacaatgtgacgcaagggtattataacaacccagagagtacggaaaaagcgctgacttctgacggctgggtaaaaacgggagacctcggatttattagtgaaagtggtaacttagtcgtaaccggaagagaaaaggacattattttcgtgaacggaaaaaatatctacccgcacgatattgaacgggtcgcgattgaaatggaagaggttgacttaggaagggttgccgcctgcggtgtatatgatcaaaagacacaaagcggagaaatcgtgctctttgttgtttacaaaaaatcacctgaaaaattcgcaccgcttgtcaaagagataaaaaagcatttgtacaagcggggcggctggagcataaaagaagtccttccgatccgaaaactccctaaaacaaccagcggaaaggttaaacgctacgaacttgccagacagtatgaggcagggaatttttcaacagagtctgccgccatcaatgaatgtttggagagcagcccggaaacatccggacagacacccattcatgagatagaaacggaattgctgtctatcttttccgaagtgctcgatggaaaaaaggttcacctcgctgacagttattttgatatgggagcaaattcattacagttatcgcagattgccgagcgcatagaacagaaattcggacgcgagcttgccgtttcagatctctttacgtatccttctatcactgatttagcggcatatctgtctgaaagccgggctgaaatcaaacaggacgcggcagcgaaaccaagccatgtgacaccgaaagatatcgccattatcgggatgtcgctcaatgtcccgggagcgtcaacgaaaagtgatttttggaatctgcttgaaaaaggtgagcacagcattcgagaataccccgaatcccggctgaaagatgcggcggattatttaaagtccatccaaagcgagttcaatgagaatcagtttgtgaagggcggctatttagatgaaatcgaccgctttgattactcgttcttcggtttagctcctaaaacggctcagtttatggaccctaaccaaagactgtttttgcagtctgcatggcatgcgattgaagatgcgggctatgccggcggcagcatgaacgggagccgtgtcggggtatatgcagggtactcgaaggtgggctacgattatgaacgtctcctttctgcgaattatccggaggaacttcatcaatatatcgtgggcaatcttccttccgtgttagccagccgaatcgcttatttcttaaatttaaaagggccggcggtcacagtggatacggcatgctcctcatcgcttgccgccgttcatatggcatgtaaatctttaacgtccggcgattgtgaaatggctcttgcaggcggtatccggacatcgctcttgccgatctgtatcgggcttgatatggaatcttcggacggatacaccaaaacgttcagcaaagattcagacggcacgggcacaggtgaaggcgcggccgcagtcctgctaaaacctttgcaggatgctgttcgcgacggagaccatatttacggcgtaatcaagggaagcgcgatgaatcaagacggaacaaccgccgggattacagcaccgaatccggcagctcagactgaggtcattgagacggcttggaaagacgcgggcattgcccctgaaacactgtctttcatcgaagcgcatggcaccggaacgaagctcggcgatccggttgaatttaacgggctttgtaaagcgtttgaaaagtacacggcaaaaaaacaattttgtgcgattggttctgttaaatcgaacatcggtcatttgtttgaagcggcaggcatcgtcgggctgatcaaatctgtcctcatgctgaatcacaagaaaaatccgccgttagctcactttaatgaacctaatccgctcattcattttcactcatcaccattttatgtgaatcaggaagctgcagcgttcacatccggtgatgagccgctgcgaggcggaatcagctcgttcggttttagcggaacgaacgctcatgtggtattggaagaatatatttctcaaagtgagtatgcacccgaggatgaacatgggccgcacctatttgttttatccgctcatactgaaaaatcactctatgaactcgcacagcagtaccggcaatatgtatcggatgacagccaagcttcattaaagtccatttgctatacagcaagtacgggcagggctcatttggatcatggcattgccatgattgtatccggtaaacaagaactatcggataagctgacccgcctgattcagggagacagaaaccttcccggtgtatacatcggttacaagaatatgaaggaaatgctgcctgctcataaagaagagctgaatcaacaagcagccgctctgattaagcagcgtttacgtacgcaagatgaacggatcacatggctgaatcgcgcagccgaattatttgtgcaaggagccgttatcgattggcgcgcgctttattccggtgaaactgtacaaaagacgccattgccactgtatccgtttgaacggagccgatgctgggctgaagctgaccaattgcgcttaaacgaggacgaaaagagaggagaagcggcattgaatatcaaccaatcgaaggcgcacattgaatccttcctgaaaactgtaatcagcaatgcttcggggatcagagcggaggaactcgatctgaatgctcattttatcgggctcggaatggattctatcatgctgtcacaggtcaaaaaagccatcgcggacgaatttggggcagacatcccgatggatcgtttttttgatacgatgaacaaccttcaaagtgtcatagattacttggctgagaccgttccatcgtcctttgcatccgctccccctcaagagaatgttccggcgcaggaaatacaggtcatttcagaagcgcagtctgaatcggatcgcagagaaggtcatcaagagcatatgctcgaaaaaataatctcttctcagaatcaattaattcaggataccttgcaagctcaattaaatagctttaatttgttgagaaacagcgggcatcattccgatgagaaagaatacgctaaggcgcaagagaaatcaattccttctgtcaagcaggggcctccggccgtcactgcagaaaagaaagcggctcaagaagcgaaaccctatgttcctttccagcctcagaacctgcatgatcagggacactataccgcacggcaaaaacaatacttagaagacttcatcaagaaatacgcagataaaacgaaaggttccaaacaatatacggacaatacccgatttgctcatgcaaacaaccgcaatttgtccagcttccgttcgtattggaaggaaatcgtatacccaattatcgccgaacgttctgacggttctaaaatgtgggatattgacggaaatgaatatatcgatatcaccatgggattcggggttaaccttttcgggcatcatccttcctttattacacaggttatcgatgattcaacccgttcatcattgcctccgctcggcccgatgtcagatgtcgccggtgaagttgccgaccggatccgcacatgtaccggagtggaaagggtcgctttctataattcaggaacagaggccgtcatggttgccctgcgtttggcgcgggcggcaacaggaagaaagaaagtcgtggcgttctccggatcttatcacggcacgtttgacggcgtattaggggttgccggcacaaaaggcggggctgcgtctgcgaatccgctggctccgggcatactgcagagctttatggatgatttgattattttacattacaacaatcccgattcgctggacgtgatccgcagtcttggtgatgaattggcagccgtactggtggaaccggtacaaagccgcagaccggatttgcagccgcaggcatttttgaaagaattgcgggcgatcacgcagcaatccggaacagctctgattatggatgaaattattaccggatttcggatcggtcttggcggcgcacaggaatggttcggcattcaggctgatttagtgacctacggaaaaatcatcggcggcggacagccgttaggggtagttgccggaaaagctgagttcatgaatgcgatcgacgggggtacctggcagtatggggacgattcctacccgcaagacgaggcgaaacgcacgtttgtggccggcaccttcaatactcacccgcttaccatgaggatgtcattagccgtccttcgccatttacaaaccgaaggagaacatctgtatgagcagcttaatcaaaaaacagcctacctggtcgatgagctgaatcgctgcttcgaacaagcgcaagtgcctatccgcatggttcgattcggttctttattccggtttgtctcatcgctagataatgacttgttcttttaccatctcaactataaaggggtctatgtgtgggaaggacgcaactgcttcttgtctgtggcgcataccgcggatgatatcgaaaatattattcaagcggtgaaagacacggtggaggatcttcgccgaggcggatttattccggaaggtccggattcccctgatggcggaggccgtaaaaagtccgggacgcgcgagctttcacctgaacaaaagcagttggttatggcatcccattacgggaatgaagcttccgcggctttaaaccagtccataatgctgaaagtgaagggcgaactgcagtatacaccattaaaacaagccgtccggcatatcgttgaccgtcatgaagctttacgtacggtgattcatcccgatgacgaggtacagcaagtgctggaacggatgaatatagaaatacctgtcattgattttaccggtcacccgcatgaacatcgggagccggaaatccaaaaatggctgacagaagatgccaagcggccgtttcatttccatgaacaagagcctttgtttagaatccatgtgcttacatcggctcacaatgaacatctgattgtgctcacgttccatcatatcattgccgatggatggtcaatcgccgtttttgttcaagaactggagagcaactacgcggcaatagtacaaggaataccgatttcaccgaaagaggcagatgtttcgtttcgccaatacttagactggcagcaggcacagattgacagcggccattatgaagaaggggtccgttattggcggcgtcatttttctgaaccgatacagcagccaattctgccaagcacagcttctgtccgttatccgaacgggtatgagggagaccggtgtaccgtcaggcttggacggccattgagcgaggctttaaggtcattaagcattcagatgaaaaatagcgtatttgtgacgatgctgggtgcatttcatctttttctgcaccggcttaccaaacagtcaggccttgtgatcggggtccccgcagcaggtcaatcgcatatgaaacagcatgatctgattggaaattgcgtcaatatgattccggtgaagaacacgtcttcttcagaaagcactttatccggttatcttggcagtatgaaagaaagcgtgaatcttgcaatgcggcaccaagccgtcccgatgacactggtggccagagagcttccgcacgatcaagtgccggatatgcgtattatctttaatttagacaggccttttcgaaagctgcatttcggaaaggcggaggcggagcccgttgcatacccggtaaaatgcaccctatacgatttatttctgaacataacagacgcgcatcaagaatatgttcttgatttcgactttaatacgaacgtcgtcagtccggaaatcatgaaaaagtggggagcgggttttacaaaattgctgcaaaaaatggttgagggagattcaatccctcttgacgccatgatgatgttttccgatgaagaacagcatgatttacaagcactttacgccgaacaccagaagcggatcacttcaataggaagcaatacggcaaattttactgaagcctatgaggcgccggtaaatgaaacggaacggcagctggcgcggatttgggaggaacttttcggccttgaacgggttggcagatcagatcgcttcctggctctggggggaaactcactccaggcaacgcttatgctttccaaagttcagaagacatttcatcaaaaggtttccattggacaatttttcaatcaccagactgttaaggaattagcacgtttcattcagaacgaaacgaaagtcgtgcacctcccaatgaaggctgccgagaaaaaagcgtattacccgacatcgccggcacagcaaagagtatatttcctgcaccaactggaaccggatcagctggcgcaaaatatgttcggccacatatcaataacagggaagtacgatgagcaagccctgatctcatctcttcaacaagtgatgcagcggcacgaagcgtttcgcacgtatttcgacattatagatggcgatatcgttcagaaacttgaaaacgaagttgattttaacgttcatgtccggacaatgagccgggatgaatttgatgcctattcagaccggtttgtaaaaccgttccgcctggaccaagctccgttagttcgtgcggagctgatcaagattgaaaacgagcaggccgaactgctcatcgatatgcatcatatcatttcggacggttattccgtcaacatccttacaaatgaattgctggctttatatcatcagaaaccattaccggacattgaatttgaatataaagatttcgcagaatggcaaaaccaacggctgaatgaggatgccatgaagcggcaggagacatattggctggaacaatttcaagacgaaattcccattctcgacctgccgacagacggttcaatagcggcagaacggtcttctgagggacagcgtgtgacatgctccttacagccggatgtcatccgttcgcttcaagatttggcgcaaaaggcggaaacgactctctatacggtgcttctggccgcctataatgtgctgcttcataaatatacgggacaagaagacattgtcgtaggcacgcctgcttcaggaagaaatcatccggatatcgaaaagatcatcggtattttcatacaaaccattggaatccggacgaagccgcacgccaatagaacgtttacggattatctggaagaagtaaagcggcagacgcttgacgctttcgaaaaccaagactatccattcgaccggcttgtggagaaattaaatgtacagcgggaaacaaccggaaagtctctgtttaatacgatgtttgtgtttcaaaacattgaatttcatgaaatccggcacaatgaatgtacatttaaagtgaaagaacgaaatccaggggtctctttatatgatttgatgctcacgatcgaagatgccggtcaacagatagagatgcattttgattataaaccaggacgattcacaaaagacaccattgaacagatcaccagacactataccgccattttaaacagccttgctgagcagccggagatgacattgtcttctgttcctatgctgtctgaaaccgaacggcatcaactgctgacggagtgtaatggcacaaagacgccgtatccgcataaggaaacggtatatcggtggtttgaaatgcaggcggaacagagtcccgatcatgaagccgttatttttggcaatgagcggtatacgtacagacagctcaatgaacgggcgaaccgattggcgcggacgttacggacaaaaggcgtacaagcggatcaattcgttgccatcatcagcccgcatcggatcgagctgattgtcggaattttggctgttctgaaagccggcggcgcatacgtgcccattgatcctgaatatccggaagatcggatccaatatatgctgagagattcaagagcggaggttgtgttgacacagcgcagcctgctggatcaattaccgtatgatggtgacattgtgcttttggatgaggaaaactcataccatgaggagcactcgaatcttgaatcggacagcgatgcgcatgatttggcctacatgatctatacgtcaggttcgacgggaaatccaaaaggtgtactcattgagcatcaggggctggctgattatatttggtgggcgaaagaggtttatgtaagaggtgagaaaaccaactttccattatactcttccatctctttcgatctgactgtgacctcgatatttacaccgctggttacgggaaataccatcattgtctttgacggcgaagacaaaagcgctgtgctttctgagattatgcgggactcaagaatagacatgatcaaattgaccccggcacatctgcacgtcatcaaggagatgaatatcgctggcggcaccgccatacggaaaatgattgtcggcggagaaaatttaagcacccgtctggccaaaagtgtcagcgagcagtttaaaggccggctggacattttcaatgaatacggaccgacggaagctgtcgtcggatgtatgatttatcacttcgacgcagaacgggacaagcgggaatttgtaccgatcggcactccggctgccaacacggatatttatgtggccgatgcaagcagaaacctggttccgatcggggtaatcggcgaaatatatatcagcggaccgggtgttgccagagggtattggaaccgcccggatttaacggaagagaaatttgttgaaaacccgtatgtcccgggagcgaaaatgtacaaatcaggggatttggctaagcgattgaaggacggaaatcttgtatatattgggcgcgttgatgaacaagtcaaaatcaggggacaccgaatcgagcttggtgaaattgaagcagcgatgcataacgcggaagcggtgcaaaaagccgcggtaacagtgaaagaagaagaagacggcttaaaacaattatgcgcgtattacgtaagcgacaagcctatagcggctgcgcagcttagggaacatttgtcatcccagcttccggactacatggttccgtcctattttgtccgtctggagcatatgccgttaacatccaacgggaaaataaaccgtaaggcgctgcctgcaccggaagcgagtctgcagcagacagctgaatatgttccgccgagtaatgagacggagtccaaactgacagatttatggaaggaagtgctcggaataagccatgcggggatcaaacataatttctttgatctcgggggcaactccatccgagcggcagccttagccgccagaattcacaaagagctggatgtgaatctgtctctcaaagacatattcaagtttcctaccattgaacaattggctgacaaggcgttacacatggacaaaaatcgatatgtaccgattccggctgcaaaggaaatgccatattatccggtttcttcagctcagaggcggatgtatttattaagtcacacagaaggcggcgagctgacttacaatatgacgggtgccatgaatgtggaagggacgatcgatcccgaacggttaaacgccgctttccgaaaattaatcgcgcgtcatgaagcgttgcgtaccagctttgatttatatgaaggcgagccggcacagcgtattcatcagaacgtcgactttacgatagaacggattcaagcaagcgaagaagaagcggaagaccgtgtgcttgatttcatcaaagcgtttgacttagccaagccgccgctgatgcgggccggactgattgaaattgaacctgcgcggcacttgcttgtggtggatatgcatcatatcatttctgacggcgtgtccgtcaatattctgatgaaagatttaagccgaatctacgaggggaacgaaccggacccgctctctattcaatataaagactttgcagtttggcagcaatcggacattcagaaacggaacatcaagagccaggaagcgtattggctggatcagtttcacggtgatattcctgtactggatattcctgcggattatgagcgacctgccatacgcgattacgaaggcgaatcatttgaatttcttatacccgaacacttgaaacagcgtttaagccaaatggaagaagacacaggagcaacactgtatatgattttattggcagcctatacgattcttttatccaaatacagcggacaagaagatattatcgtaggaacgccatctgccgggcggactcatctggatgtagagccggtcgtgggaatgttcgtcaatacgttagtcattcgcaatcacccggcgggccgtaaaacatttgatgcctacttaaatgaagtaaaagaaaacatgctgaacgcctataaaaatcaagactatccgttggaagaattaattcagcatctgcatcttccaaaagattcaagccgcaatcctttattcgatacgatgtttgtgctgcaaaatcttgatcatgctgaattgactttcgattcccttcaactcaagccgtatccatttcatcatccggttgccaaattcgatttgaccttgtcgattcaggcggaccgcgacaactatcacggactgtttgaatattcgaaaaaactgtttaagaaaagcagaatcgaggttttatcaaacgactacttacacatcctatcggcgattttggaacagccaagcattctaatcgaacatatcggattgagcggcagcaatgaggaagaagagaacgcgcttgattctattcaattgaacttttagggaaaagcattatttctttaaaatatataaaatgaggtgctccaatgtcggtatttaaaactcaagaaacgtactgggaaaacctgtttgatgaagaagacggtctaagcgcattcccttactttaaagcagcggataaagcgtcgttggtccgtaccggctaccaggaaaaatgcatctgccgttccttatctccggaagtatctcaaagaatcatgacaatggcgaatcattccgatatggcggcctatctgattttattggcgggtattgaatgcttgttatataaatatacggatcgaacgagcctgattcttggcattccaacggtatcgaagcaaaaagccggccagtcagccgttaacaacattgtcctcttaaaaaatacgctttcaaacgagagcacatttaaaaccgtattcgggcagctgaaagaagccgttaatgattctctgaaaaatcaaaacctgccgtttagaaaaatggcccggcatctaagcgtgcaatacaatgacgagcatatgcctttgattcataccgtcgtttcgcttaacgaaattcattccttgcaatgtaaagaagatactgcaaccgatacgctgtttcactttgatttggagaacaacgggattcatttgaagcttttttataacggcaatctgtacgatgagcgctatatcaatcaaattgtatcccatttggatcagctgctgtctgtgatcctgtttcagcctcaagccgcgatccatacggcagagatcttaccggaagcggaaaaacagaagctattgtttgattttaacgacaccgtcagagatttctccgggagcagaacagtctatcaattatttgaagagcaggcagaaagaacgcctgagaatgcggccgtcaaatttaaaaacgaccatttgacgtacagggaactgaatgagaaggcgagccgtttggcaagaacattgcgtaattgcggggttcaacccgatacgttagtcgccattctcgctgatcgttcattagagatgatcgtatccattatagctgtttggaaggcagggggcgcttatgtgcccctggatcctgaatatccaaaagagcggcttcaatatttgcttcatgatgcggatgcagacgttctccttgttcagcatcatttaaaaaacagtctcgcctttgacggcccggtgattgatttgaatgatgaaacatcataccatgccgattgctcattgttatcaccagtagcgggacacagccatttagcctatgtcatttatacgtcgggtacaacaggaaagccgaaaggggtcatggttgaacacggcggcattgtgaactcgcttcagtggaagaaggcgtttttcaggcattctccggcggatcgcgtacttgtcttgtacccgtatgtttttgatgcgttcattttaaatttcttcggcccgctcatctcaggagcaactttgcaccttttgcctaatgaagagaataaagaaactttcgccattcaaaatgccataaaacaagaaagaattacccatttttcaacttccccccgtcttctgaaaacgatgattgaacagatgaacagagaggatttcatccatgttcagcatgttgttgtaggcggtgagcagctggaaacagatacagttgagaagctgcattctctgcagcctcgcattcggatcaataatgaatacggaccgacagaaaacagcgtggtatctacatttcaccctgttcagtccgctgatgaacagatcacaatcggcagcccggtggccaaccatcaagcttatattttaggagcgcaccatcaaatccagccgatcggcgtaccgggagagctgtatgtcggaggagcgggagtggcccgcggctacctcaatcggcctgaattgacggaggaaaaatttgtggagcatctgcatgtccctggtcaaaagatgtataaaacgggggatctcgccagatggctgccggatggaagaatcgaatatttagggcggattgatcatcaagtgaaaattcgcggctaccggattgagatcggcgaggtagaggcagccatgttcaatctggaaaacgttcgtgaagccgcagtcgtcgcgcgggaagacgcagacggggccaaacaattgtatgcctattatgtcggcgagccttctttgaccgctgcgcagttcagagaagaattatcccgggaactgccgaattatatgattccctcccgctttatccctttggaacgcattccgctcacttccaatgggaagattgatatgaaagctttgcctgctgctgacgaaaatacgcgggcggaatacgaatacatagccccgcggaacacaatagaagaactgctggcgtccatctggcaagaagtattaggggcagaacgtataggaattctggataatttctttgattttggcggagattcgattaaatcaattcaggtgtcatccagattgtatcaagccggatacaaggttgatatgaagcatttgtttaaacacccctcgattgctgaacttagtcagtttgtagcaccggtcagcaggatggctgatcaaggagaagtgaatggcggaaccaagctgaccccgatacagcattggttttttgagcaaaaaatgccgcatgcacaccattacaatcaggccgtcatgttatattcggcggaaggctttaaagagggcccgcttcgccggacgatggaacggatcgcgtcgcatcacgatgccttgaggatgatttttgaaaaaacgccggacggatacgctccgcgaattacaggaacagatgaaagtgaactattccatctggaagtgatgaattataaaggggaaaccgatccggctcaagcgattgccgataaagcgaatgagattcaaagcagcatggtattagacaaagggccattgatgaagctcggtttgttccaatgtccggacggagatcatttgctgattgcaattcatcatttgctgattgacggtgtatcctggcgtattttgctcgaagattttgcaagcggttatgagcaggcagaacgcatacaaacgatccagctcccgcaaaaaacagactcgtttccattctgggccgatcaattgtccaaatatgcggcggaaaccgatatggaagaggagattgcgtattggaccgagctttcaagtataaagcctcagccattgcctaaggacactatcagcgaaggagcgttattaagagacagcgaagaagtgacgattcaatggacaaaagaggaaacggagcaattattaaaacaagcgaaccgcgcctacaacacggatatcaacgatctgctgctgacttcgttagggctggctgttcacaagtggacaggcacggaagacattgtcgtgaatttggaaggccacgggagagaaccgattattccggatgctgacatttcccgcacgataggatggttcacaagccagtaccctgtcgtcctgaggatggaagccggaaaaaacctgtcgcagcggatcaagatcgttaaagaagggctgcgccgtatccctgacaaaggaatgaattacagcatcatcaaatatatatccgggcatccggaagccgacagcctgcagctgaaaccggagatatcgtttaactatttgggacaatttgaccaagacctgaagcatcaggctttgcgcatctcgcctttttccacagggttatcaatgaacgaaaaccaagagagaacggccgtgcttgatttgaacggcatgattgccgaagggacattatcactgacactgagctacagcagcaaacaatacgaaagatctactatggctcaatttgcccgggggttgaaagaaagtctgcaagaagtcattgcacattgcgtaagccggcagcagacttctctcacaccaagtgacatcctgttaaaagacatctcaatcgacgaactggaacagcttttggagcagacgcgtgaattaggcgaagcggaaaatatttatccattaacgccgatgcagaagggcatgctgtttcacagcttatttgatccgaattcaggtgcttattttcagcaaacgatgtttgatctgcatggagatctggaaattgattcattttcaaaaagcttggacggcctatcgcaaaaatatgatattttccgcacgaatttttacagaggctggaaagatcagccgctccaaatcatattcaaaacgaaaaaaatcggttttcaattcaatgacttacgagagatgaaggaatcacaaaaagaagcgatgattcagaaatatgccagagaagataagatgcgggggttcgacttagaaaaaggcgcgttaatgcggttattcatccttcgtacggatgaaaaaacataccgttttatctggagtttccaccatattttgatggacggctggtgtctgccgctgattacaaaagaaattttcgagaattactttgctttgcttcagcaaaagcagcctgaacaatcgtcaattactccgtacagtcaatatattgaatggctcggccggcaagatgcgaaagaggccacggcttattgggatcagtacttggagggatatgaggagcaaaccggccttcctaaggatcaccatgcagcggaggacggacgatacgttcctgaaaaagtgacgtgtgacataagctctgatctcacttcgaaaatgaagcggacggcaggcaagcatcatgtcacgctgaacacgctgctgcagacggtatgggcggttttgctgcagaaatataaccgcagccgggacgttgtgtttggaagtgttgtatccggaagacccgctggaattccaaacgtggaaaccatgatcggcttattcattaacaccattcccgtccggttccggtgtgaagccgggacaacgtttgctgagcttatgaaagaggcgcaggaaagggctgtagcgtctcaacaatttgagacacacccgctgtacgatattcaagcgcgtacaacgcaaaagcaagatttaattacacatttaatgatattcgaaaattatccggttgatcagtatatggaaagtataggccgccaaaacggaacatccatcacgatttccaacgtacaaatggaagaacagaccaactacgattttaatttgaccgttataccgggcgacgagatgaacatctcttttgaatacaatgcaaatgtgtatgatcgggcaagcatagagcgggttcgggaacatttcatgcaaatcctgcatcaagtcgtgacagatgcggatatccgggtggatcaagcggaattgttaacggaaggcgaaagaagaacccttctgcagacgcttaacgacacggccgcgccgtttccgcagacgccggttcatcaattatttgaagagcaatcggagcgtacgcccgatcaagcagccgtcattgataaggacaggcagctcacgtacggagagctcaataagcgggccaaccgcctggcgcgaacgttaagagcgaaaggagtgcagacggatcagcctgtagccatcatcacaagaaacagcatcgaatcggtggtcggaatccttgccgttttaaaatcaggcggagcctatgtacctatagatccggaatatccgcaagaccgcatccggtatatgctggatgactcccaagccggaatcgttttaatgcagcgggacgtcaggaaacagcttgcctatgaaggcgtcacggttttacttgatgatgaaagttcttatcaccaagatggctctgaccttgctccgataagtgatgtgagccatttggcatatgtcatttatacgtcaggttccacaggccggccaaaaggcgtactaatcgagcacggaggcttgaccaattatatttggtgggcgaaagaagtttatgtaaaaggcgagaaagccaacttcccattgtattcgtcaatttcttttgatctgacggtgacttctattttcacgccgcttgtcacaggcaatgcaatcatcgtctatgacggagaggataaaacagctctgcttgaatcaattgtgcgggacccgagggtggatatcattaaattgaccccggcccatttgcaggtcttgaaagaaatgaacattgccgatcaaacggctgtccgaagaatgattgtgggcggggaaaacttaagcacccggttagcccgcagcattcatgaacagttcgaaggccggattgaaatatgcaatgagtacggaccgacggaaaccgttgtcggctgcatgatttaccgttatgatgccgcaaaggacaggcgggaatcagtaccgatcggaaccgctgcggcaaatacgagcatttacgttcttgatgagaatatgaaacccgcgccgatcggtgtcccgggagagatctatatcagcggcgccggtgtggcaagaggatatttgaaccgtcccgaattaacggcagagaaatttgtcgatgacccgtttgaacccggagcgaagatgtataagaccggagatttggcgaagtggctggcggacggaaacattgaatatgcgggcagaatagatgaacaagtgaaaatcagaggctatcgtatcgaattaggcgagatcgaggcggcactgcttcaagaagaagtgattaaggaagctgtcgttacagccagagaggacgtccacgggtttaaacaattgtgtgcatattacgtgagcggcgggcaaacaacggcagcccggctccggaaacaattgtctcaaacccttgcaagttatatggttccggcttattttatcgagcttgatgaaatgcctttaacttctaacggaaaaataaacaaaaaagggctgccggctccggatttcgaactgcaggacagagcagagtataaagctccccgaacaaaagctgaagaaatattagtttctgcctgggaatcggtattaggcgctgaaaacgtcagtattcttgataatttcttcgatcttggcggagattccattaaatccattcaagtatcctccagattaaatcagcaaggatacaaaatggaaatcaaagacttgtttcaatatgcaacaattgcagaattgagtccgcatatcaagcagaatctgcgtatagccgatcaaggtgaggtcaaaggaaaagtcagcctgactcctattcagcattggtttttcgaacaaacaacaacagatcagcattattacaatcaagccgtcatgctgcatgcgccggaaggttttcaggaaacgcagcttcgtcaaaccctgcaaaagcttgctgaacatcacgatgcgctccgcatgacgttccggactacggaaaatggctgtgaggcacagaatgaagaaatcacccaaagcggactgtaccgcttagaagtcatgaatctgaaagaagatcccgatccgggacgtacaattgaagccaaagctgatgagatacaaagcagtatgcatttaagtgatgggccgttaatgaaagccgggttgtttcaatgcgcagatggagatcatttgctcattgccatccatcatttgattatagacgggatttcatggcgcatactactggaagatatcgttagcggctacaagcaagccgagaacgggcgagtgattcaactgccgcaaaaaacagactctttccaattatgggctaagagactgtcagaatatgcgcaaagtgaaaccataaaacaagaacaggaatattggacaaaaatcgaacaaaccgaagtcaaaccgctgcctaaagattttcatgaaacccatacaactgcaaaagacagcgaaacagcaactgtggaatggacgaaagaggaaacggagctcttattaaaacaagcgaatcgcgcttatcacacggaaataaacgatttgcttttaacttctctgggtctttccatatcgcattggtcaggactggaacaaattccgattcatttagagggacacggccgagaacagattatacaagatatagatatctcccgcacggtcgggtggtttacaagtctgtatccggttgtgctgcacgcgcagccgggcaaagaaatctctgattatatcaagacgaccaaagaaggattgcgccaaattccgtataaagggatcggatatggaatagcaaggtacttaagcggcggaatgccatcgaaactcaatcctgagatcagctttaactacctgggacagtttgaccaagatttacagcagcatggggttcagttatcttcttattcttgcggttcagactcaagcggaaatcaagaaagaccgtatgtattgaatataaacggaatgatcaccgagggccggctgaagcttacgatcagctacagcagcaaacagtacgcaaaagaaacgatcatgcggttatcggaaacgattcaaagccgcctgcggacaatcattacgcattgcgttcataaagaacaatcggaactgacgccaagcgatattttgttaaaaggcatatccattgacgaattggatcagctcctcattcaactgccgcatgcaggtgaggttgaaaacgtgtatccgctcactccgatgcagaaaggaatgctctttcacagcctgctggacgaggcctcaagttcttattttgaacaagcatcgttcgatttgcagggagagttaaagattgattggtttaaagcaagccttgaacgattatttgaaacatacgccgtgctcagaacccgtttttacagcggctggaacgatactcctttacaaattgtctataaaacgcaaacaccgcaaattcattttgcagatttgcgtgatatagaggagcacctgagagaggatacaatcgcagcctatcaaagagaagacaaggcaaaaggatttgacttggctcgggatccgctgatgcgcatagcgattttccgtatggaagaccgcaaatatcatttgatttggagcttccatcatattgtgatggatggctggtgcctgtctcttatcacgaaggaagtgtttgatcattatagcgccttacaggaaggcagggaaccagaaccgccatcggcagttccttacagcgactatatcgagtggcttgaccgccaagatcagggagcggcaaagcggtactggagcgggtatcttgaaggatataaaggtgaaaccacgcttcttcataaaatagcgcagcatgaacaaaaagaatacgcttatgccaatgcgatctgccgatttgatcacgaacagacaaaacaattacagcagatcgcaaatcagcatcaggttacgttaaatacgttgatccaaacgttatgggggattttgttacagaaatacagcgggtccgcagacgttgtcttcggcagtgtcgtgtcgggaaggccggcggaaattcctgatgtggaacagatgatcggcctgttcatcaataccattccggttcgcatccgctgcgatgaggacagcacttttgctgatacgatgcaaatggttcaacaaaacgcgctggcttcccaatcgtacgatacctatcctttatacgaaattcaggcccaaacggaacaaaagcaaaacttaattgatcatatcatgatctttgaaaattatccgatagggcagcaagttgaagagggccatgatgctgcggatttaaatatcgtgaatttccatatagaagaacacacccattacgattttaatgtagttgtcatccctggcgaacaactcaccgttcattttagttttaaccgaaatgaatatgaacaatcagaggcagagcggattcgcggacattttgaacagcttatgcagcaagtattgcagctgccgtctgtcaaagtagaagaaatggaacttctgacgcagcaagaaaaagaacagctgcacagccgttttcagtctaacgaaatgcattacccacgtgaacaaacgattcatcagctgttcgaggaacaagcactccggacgccggaccatgaggcggttatattcgaggagcagcgtatgacttaccttgagttaaatgaacgggccaatcaactagcacgcactttacgagctgaaggcctacaggccgaccagcttgttgcgatcatggctgagcgttctctagaaatgatggtcgggatttatgcaatcctgaaagcgggaggcgcttatgtgccaatcgacccggattacccggaggaacgcatacgctacatccttgaagattcaggagcgaccctgctgctgtcacagcgtcacgtgaaagaacgggttgcttttgcaggaacggtcatcgatctcgatgatacttccgtttacgatgatgacgtttctaacttggagccgctgtccggtgcgggcgatagggcatatgtaatctacacgtccggatcgaccggcaagcccaagggggttatggttgaacatcgtccggttataaaccggttgatgtggatgcaaaaggcttatccgatcggcagcggcgatacgattttacaaaagacagcgatcaccttcgacgtctcggtatgggagctgttctggtgggctttgaccggtgcgaaggtgtgcctgcttccgctcggcggagagaaagaccctgaagtgatttggaacacaatagaagagcaaagtatcacgacaatgcatttcgtcccggcgatgctgcacgccttcctgaagtttgcggaaacacagacggcgagcggacagacaagcaagctgcgtacgttgcggcaagtgtttgcaagcggtgaggcattaatgccggcacatacggcaagatttcatcgccttattacgcctgtgaacggcgcccaactgatcaacctgtacggcccgacggaagcaacggtcgatgtgtcgtacttcaactgcgaagcaaaccaagcgtatgcatcagtaccgatcggcaagccgatctcgaatatacagctgtatatgatggcaccgggatcaatgcgtctacagccagtcggagtaccgggagagctttgtatcgcaggcgacgggctggcgagggggtacctgaaccgtccggagctgactgcggagaagttcgtggatcatccgttcgagcccggcaaacggatgtaccggacgggagatctggcgagatggctgccggacggtaacatcgaatatttgggccggatcgatcatcaggtgaaaattcgaggatacaggatcgaactcggcgaggtggaagctcagctcttaaagatagaatcggtacaggaagcagtagtcaccgctcttgaagacggagccggagaaaagcagctatgcgcatacttttcagcgaacaccgagctgatggtaagcgagctgcgaatagcgctgtcgcaggaactgccggggtatatgatcccgtcgtactttatccaactggagcgtttgccgttaacggcaaacggaaaaatcgaccgcaaagcattaccagcaccagaagaaggcgtgcaaacagggatcgaatatgttgctccccgtacagcggcggaagcgcagctggcgcatatctggcaagaggtgcttggacttccgcgtatcggcgtgaaagacaatttcttcgacatcggcggtcactcgctgcgggcaacgacgctgatggcgaagctgcacaaagagatgggggtcagcctgccgctgcgggaagtgttccgatcgccaacaattgaagaaatggcagaaacgattaccggaatgaaacacacagcatatacatctatcccgaccgttgaagcaaaagaatactatgccgtctcctcggcgcagaaacggctgtacattttgaatcagctgaaaggcggagagctgagctacaacatgccgagtgtcatgagagccgatggagctttggatcgggaacttgtcgagaaggcgatccgcaagctgattcagcgccatgaaacgctgcgtaccggctttgaactgatagacggagaaccggtgcagcggatctatgacgacgtccaatttgcagtggaattcactcaagcgaaagaagaacaggcggaagccctcgttcatggttttgtgcgtgcatttgacttggagaaagcaccgctgctgcgggtaggattgatcgagcttgcaaaagaccgccatttgctgctgtttgacatgcatcatatcatttccgatggcgtatctatcaagaatttgattgaagagttcgtttcattatatgaaggaaaagaattcccgccattgcgggttcagtataaagattatgcggcgtggcagctgtcggatatgcaaagcgaacggatgaagaaacaggaagcgtactggctggatgtgttcagcggagaggttccggtgctggatatgccaaccgactacggaagaccggctgcgcggagctttgatggaggacaaatcgagtttgtcatcggaccggagttgacggaacagctgaaaggcttggcgctgaagagcgaaagcacgctgtacatggtcctgctggctgcttatacgaccatgcttgccaaatacagcgggcaagaagacatcgtagtaggcagcccgattgccggaagaacccattcggatttggaaagcttaatcggcatgtttgtgggcacactcgcgatacgaacgaatccggtcggggaaaaaacattccgagaatacgtgcaggaagtcaaagagcatacattaaaagcgtacgaaaaccaggagtatccattcgacgaactggtggacaagctgaatgtgtcccgggatttcagccgccatccgctatttgacacgatgttcatatggcaaaacacagaacagggagaattgagcctcgatgatgtgcgttttaccccttatccggacaaccatgcgatggcgaagttcgacctgacgttccaagcggcagaaaatgaagacggaattacaggtatgatcagttacgcggcagcgctgtacaagcaggaaactgcggaacgcatggcaaagcactttatccaattgatcgaggcgattgcgaatgatccgcaggcgccgctttcatcgctggagatgatcaccgcgcaggagaaagagcagattgtggaaagatggggtcaaccggcgatagactgcccaagggacaaaacaattcaccaattgttcgaggagcaggcggagcgcacgccggaacatacggccgcagtttacgagaaaagccgattcacataccgtgagctgaatgagcgggccaaccgcctggcgcggattttaagaagcgaaggcgtgcagcctgaccagcctgtgggtattctggcagaacgttctctggaaatgatcgtggggattatggcgatcctgaaagccgggggcgcgtatgtgccgatggatccggacagtccgcaggaacgcctccgctatattctggaggattcaggagcaaaggttctgctggcacagccccatttacaagatcgtgtatcctttgccggagagattttactgctgaatgacgaacgaatgaacagcggggatggctcgaatctggtgacggcagccggaccggatcacttggcgtatgtgatttacacatcaggcacaaccggcaagccaaaaggcacgctgatcgagcatcgccaggtccttcatttgatggaggggatccgcggacaagtgtacggtgcttatgattcgggattgcgtgtgtctctgttggcaccgtactatttcgacgcatcggtcaagcaaattttcgcggcactgttagggggacatgcactgtatatcgtccctaaagcatcagtatcagacggttatgccttgtcaaactattatcgcacccaccgcattgacgtaacagacggaacaccgtcacatttgcaattgcttatcgctgcagacagccttcatggggtaacgatccggcacatgcttattggaggagaggcgctcccgcaggcgacggtggcgcaattgcttgaattgttcgcttcgaacgggtcatcaatgccgctcataaccaatgtatacggtccgacggaaacctgcgtggatgcatcggtctttcacatcgtaccggagacattggcatccgctgacgacggcggttacgtgccgatcggcaaaccgctgggcaacaaccgtgtgtatattgttgattcccatgatcggatgctgcctataggtgtaaaaggtgagctgtgcatcgccggagacggagtaggacgggggtatctgaacttgcctgaattaacgggcgaaaagtttgtggccgatccgtttgtaatcggagagcggatgtataaaacaggcgaccttgcccgttacctgccggatggaaacattgaatatgccggaagaaaggatcaccaggtcaaaattcgcggttaccggatcgaacttggcgaggtggaagccgctcttctcaacatcgagcatgtacaagaagcggtgatcgtggccagagaaaatgcagaggggcaaagcgatttgtatgcctattttacaggggagaagtcactgccgatcaatcagcttaaagaaaaactctccgatcaaataccaggctatatggttccttcatacttgatgcaactggagcaaatgccgttaacctccaatggaaaagtgaatcgcagcgcgttaccgctgcctgaagcaggcttgcagaccgggattgactatgttgctccaaggacaagaccggaagagcagctggttcacatctggaaagaagtattgaaggtagaacaagtcggcgtgaaagataactttttcgatctcggcgggcattcgttacgggggatgacgctcgttaccaagatccataagcaattcgacaaaagcatttcattgagagaagtgtttcaatacccgacgattgaagaaatggcgagggtcattgcaggcgcggaaaccagcggtccggatgaaatccctgttgcagaagccaaagatgtttatcctgtatcttctgtgcaaaagatggtttacctgtctacacaaattgaaggcggagaactaagttacaacatgccggggattttgacattggaaggcaggatcgacatgaatcgtttacaatctgcgttccaaagtctgatccagcgccatgaatcgctacgaaccggatttgaaatggtccgcggagagctggtgcaggtgatcaagccgcaggcggatttctctatagaaaggtacaaagcagctgatgaagaggtcgaggagctgttccgcaatttcgtgcggcctttcgatctcagtcaggctccattgcttcgggccggactcatcgaattagaacaggacagacatgttttcatgtttgacatgcatcatatcgtttcagacggcgcttctatgaatatttttgttgaagaactgattcaattgtatgacggcaaagaattaaccccgctccggattcaatacaaagattacactgtatggcagcagcaggcggagcagagggaacgaatcaaaaggcaggagagctattggctgaatgtatttcatgaggaactcccgccatttgagctgccgaaagattttgccagaccgcgaattcgaagctttgaaggcaagcgatacaatttcgccctcgatgagactgtgatccaggggataaaacagatggaagaattgaccggatcgaccgcttacatgatcttgctgtcagcctataacatactgctggccaaatacagcggtcaggaagatatcgtcgtcggtacgcctattgcgggaagaatgcatgaagatttacagcatattatcgggatgtttgtgaatacgctggccatccgtacggccccggctggagaaaaaacctttatggactatgtaacggaaacaaaagaaacgatgctgaaagcttatgaaaatcaagagtacccttttgaagaattagtcgagaaactgggagtgaaacgggacttaagccgtaatccgttattcgatacgatgtttgttctgcaaaatacggaacaaacggatatcgaattggactctctcgcggtcagaccatatgaacaaacgaatacggcggccaaatttgatttgcagctgaccttcgtgatgaatccgcacgagattcaaggaagctttgagtattgcacgaagctgtttaaacagaaaaccatcgctacgctgagcaaggattacgccatgattctgtcggcgatcataaaagacccatcgattcctttaaaagaaattcaattaagtgagaaagtaaacaaaagtgaacactttgcaagcgaaatcgaattgaatttctaaaaacggccgaaaccggctgtccccggcatgatgtttttacggggacagcggtcagccggctaaaacttactggagggatattaatgtcagaatttaagcaacaggagttgttctggagcagcatgttcgatgcggaagatcgtcccagtgcaatcccttcgtttcaaatgtcggactcagcaatagagcatgatgcgtcgagtgcacccaaccgtattcacagttcattgagccccgatgtatccctgcgcatcatgaagatgacgaataaatcgccaatggccgtttatatggttctcctggttggaatcgagtgtcttttgtacaaatatacgggggaagagggcgttattgtaggtgtaccgacctttgaagacgaaaccgatgaagaccttcgtttagaccaagtcatgttaatcaaacaaaacataaatgcggacagcacgtttaaatccatttttaatgaattcaagcatacgctgaacggagccatcttacatcagcacgttcctttcgataaaatggccggtccattaaatctgaactacgattcaaatcatttgccaatgatccacacgattgtatcactagatcagcttcaccccattcgttttagagaaacggctgcttctgatacgttatttcagttttccatagaaaatgattcgattcatttaaagttaacttataatgaacaagcttatgatcgccagtatatgatgcaagtgatcgaacatgtaaaccggattttttcgattttgttattccaacccgaccttatgatccgccagcttaatattctgtcagactcagagacaaatcaactcatcgcctataatcaaacggctgcagagtatccaagagaaaaaacgattcatcaatttttggaggaacaagcggaacgtacccctgatcaaacggctgttgtctacgaggatagccgtctgacgtaccgtgaattgaatgaaagggcgaatcaactcgctcggacactgcaatctgagggcgtacagccggatcagccggtcgggattatggccgaacgcgccctggatatgattgtagggatcttcgggatcttgaaagccggcggggcgtatgtaccgattgacccgggctatcccgaggaacgggttcgatacatattggaggattcggatacgaagttgttactcgtgcagaatcaatcgcaagagagagtaccttttacgggaaaagtgctggatatgaaagatccgcaaaacttttgtgaagacgggtcgaatgtagagccggctgctggtccggatcatctggcctatgttatttatacatcgggttcaacgggcaagccgaaaggggttatggttgagcatcggtcggtcatcaatcggctggtgtggatgcaggaaaaataccctctcgatgagcgggatgcgattctgcaaaaaactgcgatcacctttgatgtatcagtgtgggaactgttctggtggacgatatcaggttccagattggttctgttgccaaacggaggagaaaagaatcccgagctgattttagatacaattgcacaaaaaggtgtcagcacaatgcattttgtaccggcgatgctgcatgccttcctggaatccatggatcagaagccaagcgggatgttgaaacaaaaattagcgtcattaagacatgtgtttgcaagcggtgaggctttgaagcctgtacatgtcgcaggctttaaacacatcatcacatcggtgagccaggctcaaatcatcaacttgtacggaccgactgaggcaacaattgatgtatcatactttgattgccagacggaagaaacatatgcatcgattccgataggcaaaccgatttccaacattcaattgtatatattacatgctgatttggaacatatgcagccgatcggtgtggcgggagaactgtgcattgcgggcgatgggcttgcaaggggctacttgaatcgtcccgaactgacggccgagaagtttgtaaaccatccgattgcatcaggagaacggatataccggacgggagacttggcaagatggctgcctgacggcaatatcgagtatttgggccggattgatcaccaggtgaaaatccgcggttaccgcattgaaatcggcgaagtcgaaggcgctttttttcagctgccggcgatcaaagaagccatcgttatcgcccgggaaatcgagggggaaacatccttgtgcgcctattataccgcacaacatgctttaactgcaggcgagctccgtgaagagctgtcccgccagcttccatcctatatgatacctgcgtatttcgttcagctggaagagatgccgcttactttcaacgggaaaatagaccgtaaatcccttccttctccaagagagaatcttacaggcatgaactatgaagctcctcgaacagaactggaaaaaatactggccgcggtgtgggagtcggtcttaggcttagaacgggtcggaatctcagatcattttttcgaattggggggcgattccattaagtcgattcaagtgtcctcaagattataccaagccgggtataagtttgaaatcaaacacttgtttaaatacccaacgatctctgagcttgttccatacgtagagccggtaacccgaatcgcagaacaaggggaaattaaaggccgggcgctgctgacaccgattcagcattggttttttgaccagaaatacccggaattacaccattacaatcaagcggttatgctttattggaaagagggactggatgaatcaaagcttcgggacgtcatgaagaagatcacagagcatcacgatgctttgcgcatggtctatgttccgacagaagatggatatgaagcccgaaatcgcgggatcgatgaaggtgatctgttcagccttgaagtgatctcactacgcgaagaaaaaaatgtgtcccagacgatagaaaccatttccaatgagattcagcaatccattcatttagccgaaggaccgctcatgaaactgggattgttccggtgtcaagagggagatcatttgctgattgcggttcatcatctggtcatcgacggcgtatcgtggaggattttacttgaggatatagcagcagcttatgagcagcttcaaaacggcgaagcgatccggcttccgaagaaaacggactcttacctgttatgggctgaacagttgaatcgttatgcagaaagtcaggaattcgaagcggaaaatcaatactggttcagacagaaacataatccgcaacttacattgccaaaggacaatgaacaggagaccggtctggccaaagacaaggaaacggtcatcgttcaatggaccgttgaggaaaccgaacgtttattaaaaaacgctcaccgggcttattcgaccgatatgaacgatttattactgaccggtctgggaactgctattcatcgttggaccggatatgaagacattctcattgatcttgaaggacacggcagagagtctatcattccggatctcgatatttcgcgtacggtgggatggttcacaagtctatatccggtttcgcttcaaatcaaagctgatcaggatatcccgcagcggattaaaacagtgaaagaaaatttgcgtcagatcccccaaaaaggaataggttacggcctgatcaaatatttgtccgatcacccgaaggcacatgaatggaccggacatccggaaatacgtttcaattatttgggtcaatttgatcaagatgtccggaacggcaggatggagatatccccttactcaagcgggaaaacagccagtgacaatcgtcccatgacctatacacttgatatcaacggcatgatttcagacggccgattgtcgctggccatcagctattgcggtaaacaatatcaaagagaaacaatggaagcctgtgccgatctcttaaaaagcagcctgcagcaagtcatcgcacattgtgatgctcaagatcaaattcacctgacgccaagcgatatttcgttaaaaggtataacgatcggtgaattagatcaatttgtgcagcaaacgagtcatctcggtgacattgaaaatatatacccattaaccccgatgcagaaaggaatgttgttccacagcttgatcgattcggcttccgaagcttactttgaacaagccgcttttgatctgaaaggtttcttggatatcgatgcattcaggatgagtttggcgcatctggccgaaaaatatgacattcttcggactcttttttatacagaatggaaagatcagcctttgcagattgtattccggcaaaagccgattgaaacggccgttgaagatattcgcagcatgaacagtcatcagcgcagcgagtttattgccgattttgcaagaagagataaggcgcggggattcaatctcacccgggatgctttaatgcgcgtatcgatcctgcggacagaagaagaccaagcgcgattgatatggagctttcatcatattttaatggatggctggtgtttgcctcttgttacgaaagaagtgtttgaaacctattatgcgatactcgagcaaaggcagccgaagcggggagccgtcactccatacagccgatatatcgaatggctggatcaacaagatcacaagcaggcgtcagcctattggcgtaactatttagaaggttatgaagggcagactgttttgttacaagaacaaacttccgaccgggcgaaaggatacgaaaaaggtgagcatgagtttcgtttaggaaagcggctcacagacgaaatcaaacgggccgcaagccgccagcaagtcaccgtcaatacatggatacaaaccgcatggggcttattgctgcaaagatacaacgggagtcaggatgtcgtcttcggcactgtcgtatccggcagaccggcagaaattccgggaattgaaaccatggtcggtttatttatcaataccattcccgtacgtattcatacgcagcctgaaatgacagctgcacaagtattgaaaatgaaccaggagcgggcactggcttctcaaaaatatgatacatttccgttgtatgacattcaggctcaaactgagcaaaagcagcagttgatcaatcatattatggtatttgaaaattacccggttgagaaacaaatagaacatatgaagcaggatgacaacgcattagacattctcgattttcatatggaagaacacactcattacgactttacttttatagtgatgccggatggagaaattgacattcgttttgtatacaatcgcgatgtttatgaccaagcaagcgtcgaacggatgcagacgcatttcatgcaaatcatgaagcaaatggcggacgatcaggaaattcgcgttcaagaccttgatatcgtaacagcggatgagcgatcgctcctgatagataagttcaacgatacggcggctgagtatccaaaggaaaagacgattcatcaattgtttgaagaacaagcggagcgaacgccggagcaagcggcgattgtttttgaagataagaagctgacgtatcgggtagtaaatgaacgcgccaatcagctggcccgaaccttggttgccaaaggacttcaggccgaggagcttgtcggcattatggcggaacgttcaccggagatggtgataggcatccttgctattttgaaagccgggggcgtttacgtaccgatcgatccggattatccgaaagaacgcatccattatatgcttgaggattctaacgtctctatcttattattgcaacatcatcttctggaaggtaccgattatcaaagtcatactatcttccttgacgatccgtcatcatacggcgccgaagcatctaatctcaatctgaacgtgatgccaaatcaattagcctacattatttatacatcaggaacaacggggaatccgaaaggcacgctcattgaacataaaaacgtggttcgtctgttatttaataataaaaatgtttttgattttaatgcatcggacacatggactttgtttcattccttctgctttgacttttcagtatgggaaatgtacggagcgctgctgtatgggggcaaattagtgattgttccgaaacaaatagcaaaaaacccggaaaggtatttgcaattgttaaaatcggaagctgtgaccattttaaatcaaacgccaagttatttctatcaactgatgcaggaagagagagcagatcccgaatccaatttaaacatccgaaaaatcatatttggcggagaggcgttaaatccatccttcttgaaagactggaagcttaaatatcctttaacacaattaatcaatatgtacggcatcaccgaaactaccgttcatgtcacatataaagaaatcacggaacgggaaatcgacgagggcagaagcaacatcggacaacctattcctactctgcaagcgtatattttggacgaatatcagcgcattcaggtaatgggcataccgggcgaactctatgtggcaggagagggactggccagaggatatttgaaccgcccggaattaacggctgagaaatttgttgaacacccgtttgccgcaggcgaaaaaatgtacaaaacgggagatgtcgcccggtggctgcctgacggcaatatcgagtatttgggaagaattgatcatcaggtgaaaatccgaggctaccggattgaaattggcgaggtcgaagcggctttattgcaatcggaatctgtcaaagaagcggtcgtcatcgcaattgaagaagagggctcaaagcagctgtgcgcctacttgtcaggagacgattcattaaatacggcgcagctgaagcatcatttactgaacaaactgcccgcttatatgataccggcttactttgtacaaatggagaagatgccgataaccgcaaatggaaaaatcgatcgaaaagctttgccggctcctgagggaaataggctcaccggaaccgaatacgaagcgcccggaacgttgattgaaaagcagctggccgagatatggaagaacattttagctctcagcgacccgggaattaaagataacttctttgacgttggcggccattcgctcaaagtattgcaagtaattcatcaaatcaacgaccgtatgggaatcaaaatgcattatcaagccgtatacgattttcctaccatcgaaacaatggcacgcgccattcaagcggcagttttcgagtccaagacggataacgtattcgtcaagatgaatcagaacggtttaatccctgtgttctgtttcccgcctttaatcggatacgggctggtctataatgaaatggcgaaaagacttgacggccgctgcaccgtctatgccgctgatttcctagaagagccgtcttacgaaaaagagatcgttgaccggtatgcagaaagcatgataggcattcaggaacaagggccctttgttttacttggttactcctcggggtcgaatttggcttttgaggttaccaaagccttagagaagcgcggacgcatcgtatcggacattatgatgcttgattctaaaagagccgtttcggtgaattatttttcggaagaggaaaccgaagagatcattcatcggaatctggatatcattccggattattatagagaattattaaccattccttcgattaaggataaaatcagaagctatctcacatatcacaataaactgatcaattccggcgcggtgaacgccaacattcatcattttctatgcggcgagttgaccgatagaggatggaagcaatcaaccgcacagcattaccttgagtacaaattaaaaggagaccatgtgacgatctttgaccctcacaatatcgaagaaaatacggatacaattcgatctattattaaaaggattgaagagcggcatcatcacggacttgttcttgaagaacaactgtcaatgggatcgtttgctggcgacacgaagtttgacaaaatgtaaatgattcagggcaaaatgccgctgactgcaaccggcggcatttttcataaaagagggtcagatatttgcaacgttttcactctaaaaatcattcattttacgcattcttcatgacctgttgttatcatattttttaaaaacctaatatgcggaaacaggaggatgttaagcagatgaaaaagtgcagcgtatgtttattgattcttgctttattattgagctgtttacctggggaatatgcgaatgcggtaagcactccaattgcaaaacatgttgggaattcaaatccgcttatcgaccatcatctgggcgcagatccgtttgcgctgacctataacggaagagtctacatctatatgtcaagcgatgactatgaatataatagcgacggcacgattaaggataattcatttgccaatttgaataaaatatccgtcatatcttcagcggatatggtgaactggacagatcacggaacgattcccgcagcgggtgccaatggggcgaatggcggccgggggattgccaaatgggcaggagcatcatgggccccgtcagccgcggtgaaaaagatcaatggtaaggataaatttttcctttatttcgcaaacggcggcggaggtatcggggttctcaccgcagacagcccgaccggcccatggacagatcccatcggaaaagctctggtaacgccaaatacgccaggaatgtccggtgttgtatggctttttgatcctgcagtattcgtagatgatgacggtaccggttacctatatgccggcggaggcgttccgggcggttcaaatccaacgcaggggcaatgggccaatcctaaaacagcaagagtcatgaaattaggtcctgatatgaccagtgttgccggaagtgcgtctacgattgatgcgccttttatgtttgaagattcgggaatgcataagtataacggaaaatattactattcctattgtatcaatttcgggggcgcgcacccggccgataaacctccaggtgagatcggctatatgaccagctcaagtcctatggattctttttcgtatagagggcactttctgaaaaatccgggagcatttttcggaggcggcgggaacaatcatcatgctgttttcaattttaaaaacgagtggtatgtggtgtatcatactcaaactgtcagctccgctctttacggggccggcaaaggttaccgttctccccatattaataagcttgtgcataatccagatggctccctgcaagaggtagcggcaaattttgcaggtgtcaaacagctatccaatttgaatccatatcaccgcgtagaagcggaaacgtttgcctggaacggacggattttgacagaggcatcctcagcacccggcggcccggtcaataatcaacatgtcacaaacattcataacggagactggattgctgttggaaatgcagatttcgggtcaggcggtgccaggacgttcaaagcaaatgtagcgtccgctcttggcgggaaaatagaagtgcggctagatactgcaaacggtaagcttgtcggaaccttgaatgtcccttccacaggcggaacgcaatcttggagagaaatagaaactgcggtaagcggcgcatccggtgttcacaacgtattctttgtatttaccggaactggtacaggaaacttgtttaatttcgattactggcagtttacacaaagataagcaaagggagacaaaggtacgttttctaagtccataaacgacatatgaaggagaggaaaaaatgatatcgagcgtaaaaaaaacaatttgtgtattattggtatgtttcacaatgctgtccgtcatgctcttaggaccgggagttactgaagtttcagcagcaagtgatgcaacagttaatatatctgcagaaagacaagtgattcgcggttttggaggaatgaaccacccggcttggattggagacttgactgcggctcaacgggagaccgcttttggcaatggacagaatcagttaggtttttcggtcttaagaattcatgtagatgaaaatagaaataattggtacaaggaagtggagactgcaaagagtgcgatcaaacatggagcaatcgtttttgcttccccttggaatccgccaaacgatatggttgagactttcaatcataatggtgacacaacagctaagcggctgagatacgataagtacgccgcatacgcgcagcatcttaacgatttcgttaatttcatgaagagtaatggtgtgaatctgtatgcgatttctatgcaaaacgagcctgattacgctcacgaatggacatggtggacgccccaagaaatcctgcgtttcatgagagagaatgccggttccattaatgcccgcgtgattgcgccggaatcatttcaatacctgaaaaatatatcggaccccattttaaacgatccgcaggcgcttaggaatatggatatcctcggaacccacctgtacggcactcaggtcagtcagtttccttatcctcttttcaaacaaaaaggaggagggaaagagctatggatgacggaggtatactatccgaatagtgacaacaattcagcggatcgctggcctgaggctttaggtgtttcagagcatattcatcattcaatggtagagggagattttcaagcttatgtgtggtggtacatccgcagatcatacggccctatgaaagaagatgggatgatcagcaaacgcggatacaatatggctcatttctcaaaatttgtgcgcccaggctatgtaaggattgatgcaacgaaaaatcctgaaccgaatgtttacgtgtcagcctataaaggagacaataaagtcgtgattgttgccattaataaaaataacacaggggtcaaccaaaacttcgtgttgcagaatggaactgcttcgcaagtatccagatggatcacgagcagcagcagcaatcttcaacctggaacggatctcaaagtaacggacaatcatttttgggcccatcttccggctcaaagcgtgacaacatttgttgtaaagcgttaaaggcatcagcatcgcaataagccaattttcttactcaaaaaagaaaattggcttattttctgtgggagagaagtgttgatttttttaacgatacacagacattgggtataataatgacaatgacttcaaggagtgatcaatatatgtcacggcttcacagcaaagtattaatcatagacgacgaaaaagaaattttggaactgatcaaaaccgtattaataagagaaggcattgatcgcgtagtgacagcttcgactgcccgtgacggattggctcaatttcatcaagaaaatcccgatctggtgatattggatatcatgctgccagacggtgaaggctatgatatctgcaagcaaataagagacatttcacacgttcctattatctttttgtctgcaaagggggaggaaacggataaaattgtaggacttgccatcggcggggacgactacattacaaaacccttcagccctaaggaagttgcatatcgagtcaaagcgcagctgagacgggtctcttacttacagccttctcaaaccggaaccgtgataaaaaaaggaccatttgaattaaaccaacaacaagccgagctcaccaaaaatgaagcggctattgagttaacacctaaagaacttatgcttatgacctattttctgcagcatcccaatcgggtgatcagtaaagaaacactttatcaagctgtatggggagaagatttcttcggttctgacaatacggtgatggttcatatacgcaggctccgtgagaaaatagaaactgtcccatcaaaaccagactttctcgtcactgtgaaagggttaggctacaaatttgttgtaaaggatgcgtaaggatgaattggcgattaacaggcagatacatggtatctgtcatcatagtgaccatcattacagtcttcattaatttatttatttttatgttttggctcgttttccaggcgaacagccaacatgacgaagaaagtacaccggaaactttcacaagatcattccgacaatatgtcacgttatcgaacaatggtatcacagtaaacaaagagggccaaaaagctttaaaagagcagaatgcatggattcaaatattagatgaaaacggacaggatgtttatcatgatagagaacctaaaggactgaagaaaaaatatacgcctattgaaattgtaaatttacataaatataaggatgaacaattattatcaaccatttacgctggcgggaaaaaagtaaatggcaaggagtacagttactttatagggtttaaaaatccctctctcggaaaatttgtcctctcatatgataccaaggaatttgtgacgaagttcaatgcaggaaccatcatattattatcaatagatgcattgatcgcgttactcattggctatctattcagccggcagctcacaaaaccgctcggccgtgtcattcaaggaattcagcggttagctaatggagattatacgatcaaaatgaaatccaaaggcatttataaagatgtcttctataatgtcaatcatttatcggaacaactatcttcaagcacaaaagaaaaagataaattagagcaaatgcgtgaagagtggatcagtcatatttctcatgacattaaaacaccattagcatctattcaaggctatgcagaaatcatccaagatccaaattaccatctcacagccgaacaggtcagagagtacgcccagatcattgagagtaaatccctctatatgaaagatgtgatggaagatttaaatttaacgacaaggctgaaaaacaacgatgtgatgttacatacagaacgggtaaaccttgtatcgctgctgcgggaaacgttaattgatatgttaaacgattctagatatacggataagtccattgaactccaaacgaacgtggaaaagctgatgctgaaccttgatgcgatattgattaggagagcggtcacgaatctcattttaaatgccctcgttcacaatgatcctgatgtgaagatcgttgtacagcttgaacaaaaagaacggactcatgtgacaattaaggacaacggcaaagggatagaagaagaggagctggaaaaagtgtttgatcgctattacaggggcacaaatacaggaacgacgcatgcaggctctggtcttggaatggccatagcaaaggatattatccaaaagcacggaggggacatcaccattcacagcaccgcgggagaagggacaacgatagatatacaattatcataatggctatacaaaaaaacggttctgttgattaataacagaaccgttttttcctattgttccgaaaacaatttgattcctttgacaatgttccaaatgaaaaaatagatcgccacaaggaatgtaacagcatacgtcgcaagcaggaaaggcccggcgtgcctgatgtcattcataccaagtaaacctgaagcgatgatgccaatcccaaaaatcaaataaggaatcagatgcgtccacaaagattttttcgcatgatatttcacatcgtcctggcctaagaaatagacgataatcggaaacagaaacggcgcaaaaaatatactgaagtaacataatgaagacaacattttattttctctcaaaccttttcacctctatgatttattgaagggggaattcttctggctgaatccctcactgaagtacaatcttattgtacaactccaaccttaacccgtattaatccgaaccttacatcaaccttaaattaacaaggacgggcaaggactcgtcttcttacagcaatcataagattcaatgccatattgagactcatcacattcagcgtgtctacgttggaaatacatttaatttttcgattcgattgaaaaatgacgtgtaaagtcccgattcagtccggttttctttgttctatatgtgtcaggtgtgtcttattcaatagagatagagcaaattgacaggcttttacacctcccaaaaacaagaaaatagattgatagacaatcatgagaaagatttttacaatgagttcgagctcataagaaagagccaaaatgatgcgaaggaggaaaagatcagatatgaaacgggcaatttctatttttattacgtgtttattgattgcggtattgacaatgggcggcttgctgccttcgccggcatcagcagcagagacaaaaacgccagtagccaagaatggtcagcttagcataaaaggtacacaacttgtaaaccgagacggcaaagcggtacaactgaaagggatcagttcacatggattgcaatggtatggcgatttcgtcaataaagacagcttaaaatggctgagagacgattggggcataaccgttttccgcgcggcgatgtatacggcagatggcggttatattgacaacccgtccgtgaaaaataaagtaaaagaagcggttgaagcggcaaaagaacttgggatatatgtcatcattgactggcatattttaaatgacggcaacccaaaccaaaataaagagaaggcaaaagaatttttcaaggagatgtcaagtctttacggaaacacgccaaacgtcatttatgaaattgcaaacgaaccaaacggtgacgtgaactggaagcgtgatattaaaccgtatgcggaagaagtgatttccgttatccgcaaaaatgatccagacaacatcatcattgtcggcaccggtacatggagccaagatgtgaatgatgcagccgatgatcagctaaaagatgcaaacgtcatgtacgcgcttcatttttatgccggcacacatggccaatctttacgggataaagcaaactatgcactcagtaaaggagcgcctattttcgtgacggaatggggaacaagcgacgcgtctggaaatggcggtgtattccttgaccagtcgcgggaatggctgaattatctcgacagtaagaacatcagctgggtgaactggaatctttctgataagcaggaatcatcttcggctttaaagccgggagcatctaaaacaggcggctggccgcttacagatttaactgcttcaggaacattcgtaagagaaaacattcgcggcactaaagattcgacgaaggacgtccctgaaacgccagcacaagataaccccgcacaggaaaaaggcgtttctgtacaatacaaagcaggggatgggcgtgtgaacagcaatcaaatccgcccgcagcttcacataaaaaataacggcaatgcgacggttgatttaaaagatgtcactgcccgttactggtataacgtgaaaaacaaaggccaaaactttgactgtgactacgcgcagatgggatgcggcaatctgacccacaagtttgtgacgctgcataaacctaagcaaggtgcagatacctatctggaactggggtttaaaacaggaacgctgtcaccgggagcaagcacagggaatattcagcttcgtcttcacaatgatgactggagcaattatgcacaaagcggcgattattcctttttccaatcaaatacgtttaaaacaacgaaaaaaatcacattatatcatcaaggaaaactgatttggggaacagaacccaattagttaagctttaggcggacatcagcaacgatgtccgcttttgtcatcttaaacagcaatacaaggaggtttacgtagcggatgaaactctgaaacagtatttgggcctgtacaaatgttgttagcaatctcaagaaagccaaggagtagctatgattcactgaacatatgatgtaatcgtttcacagttttgaaaagcgtttatagcgcaatgtgtgtatttcacatccgccacttttattacgtaagggggaacaagagaatgaaaaagtatgacgcatttccagagccaattggcggctatactgtcggccgaacccagatggattttgagtacacggcatcagatcatacaaaaagagaactgacggcgtttgtgtactatccgtccgacagcagcgaagggaagactacatcagcgtacatgtttcctgaagtctgcgaaatgcttgatgagcagccgcttctcactgcgttgaaggatgcttactctatagatatcaagacccaatgttacgacgaccttgctctctccgggaaggaaaaacgctatccggtgttattctatgtttgcggcgggggcggttctccagaatggggtacagtgatctgtacagacttggcaagcatgggatatgttgtagtaagcatcggccatcaaaatagcacgatgtataagcgtaaagatgggcgcctgtttaatgtatcaaaggatttttcggatgtcattatggcgttttctgaagatccggagatgctggctttggctggtaagatggagatacggcccgacgatgaaactgccattgagatgtgccaaaacgtgcttacactgccgatacttgacaagttaacagagtatagtgaattacaggcagaagatgtaaggtatgtagccgattatcttgtcaaattggattctggagagctgaattccatctttaagggcagattgttgcttgatatcggcatgggcatagtcggacattcttatggagggcctacgacggcgattgtttgccgggacgacgaacggttcgcctgcgggattggcttggatagcggagcgttcggccttcagggcagcgacattaagaaaccctttttgctgctgttttctgaaccgaactataacatgaatgcgatcattggcgctaacaatagcatggatacctattatttctctgttgatcgtgctgcgcatttagattactgcgacatcgtgtttaccagtgtgaataaggaacttagaggcgaacgggatgccatggagatgcgaaatcttgttacagactatacgaagaacttttttgatcattacatactgcagaaggctgcaagtatggaaagtctggcatacgatggcgtggacttgattaagaagaccagcaacaagtgacataaccgattaaaatactcaaactgaaaaacctttatgaccaatttaatttattaaggacgtagaggttttttaatattaccttacaaaaaggggatgttcttagaatatggatccacttttatattctctacataatttctagtttacataatatatattctaggaagtaaaatcttcaatgaaaattctgtctcgttatcttaagtatacttagttggtgagacagaattaaaaaaatcagatgtattacgatttataattaaccttgaacataacaccatctttaataatcacctcgcactttacttcgtctacatcagttttgccattggataatcttgtgtacacataaacccaattttcaccgtctcttttgaagtaatcaaaatcgtaagcattcggatatttatctcttacccaaattaatcctggcagagtctccgccattgctggtgatccagatactagcaaggacccaccagtgctgtagctcctgctatcttcttgaatttactttttaacatttttattgcccccttttgatttgttgcctgctgcttactcacttagcaggcaatctgattttatcaccttgcaagagggaaatttgtcatattttgtagataagagtattactttcggaaaaaatacaaaattatgtcaattattttccattcttgaattctgaaacttttcggagggcttctgatagcgatcctctttgcaaatgtgcttacataaaaaaaaccggcgtgttggccggtcctttcttctagacaacatgtacccttcttgattactcgtgaggaagcattaaagcctttattaagcctcgtaatttctgctgtttgaacctaaattcctaaagagtaaagaagaaagcagagctaacacaaaataaacaacaacgaatccaccccaaaagaagatagcctgatcaaatgggaagccaaacactctaaaaattattctgtgtaccactccggcaataatgaccaggatgcttgctgataacgcaaaagtaatgtgtttcaatttaaacctctccttatgaaagattaataactctgtcagacccattggcgatttcttgatcgtgagtaacacaaataattgttttccccatatcttttaactgatggaataaagacaagataatgtttttgttatattcgtctaagtttcctgtcggttcatcagccaggataatatcacaaggcttcaaaataattcttgcaatggccacacgttgttgctctccgccactcagttgataaacctttttctttaaaaagcttttatccagaccaaccatttctaaagcttctgtcaacttttctttcttaaagtcttttgcataagccgtcgaaagcagtaagtttgttaatactgtttcattgtccataagcacgtaattttgaaagatataccctaagttctctctccgcagtttcatcacgtcgttagatttaggatttcgaaaacctaaaatttcaatatctcctgagtgtggagtatcaagaaggcctattatatttagaagggttgtcttccctgaaccgctcttaccaacaattgaaacaaattcattttcttttatctgaagagagaaattcgacagaacaggtttttcattaaacgtctttgatatgttgttgagtgtaatcatattctatctccttttaagatcttatgcatgtttttcttgtttaaatagacactcaggaaataaagaataagcagctcgattacaataaacagcccaacaaaaattgttaattcaaagattctataatatatactgatacctaaaccaataaggcaattggatagaagagaaaagatgattaaatttttatttctggcccaatatgaatatccaaaaagctctttaaggtacagccgatatgcattcgcgctgtaatacgaccaaatataagcaacaagaaaggcgatggagaggataactgttattgttagtccaattaaattctgcaagaattgattctgaattcttgctataccgtcgcttagttcttgataaaccgaaattgatgaatcaattagatctctcgtattggtcttctccaaataaggaactatgcggtcatacgccatgccttttgaagaatctgaaaagaataaacttgaggttgagtaagcacctataacagatggatcaacgttgtccgtgaaaattgcagctattggatcaacaatgttatttttattgccggcatccccaaactcactattaaaggtgaaatactcctgcctatttttagtataaatgatgttgattttcaattcatcttttttaagggtgtttaaaggttgattcatctccttgttatacatattatctaattcaactttgtcaaagaaaaactgatccctgtatgtagctattattttttctttaaattttcatacttttgtggaacaagcaggttcaatgtatttgaatcaacccttaattgcttttggcttatggcttccccattagcgccgataatgggattcacctttaaataattagggctgattgtaatacttcgtccagaaggagagtaaatttcatttttctttgtcgtatttaaggtgtaaaaataaacaggtttttttccgtctttccttagtacagcatagttatgtgcatcaatgacgaacgcatttttatgcttctctaattgatgatacaacgcgcgaactctaacatttttctccctgtctaattttaaatcactatagtctatcccggtatttgcaaagcttgtcttataagtgttttgtgtctttttccagtacgattgattatcaagctgctgtttgagatcgaatacgttagaaagtgaaaacgcaacaatattgaagagcaatatcgtgacaacaattttaaagcctacagataaccattggaattttttaatcggtgtgctgcctttgatcgagccactaatgtcgctgttgttatacaagacgagggtaaccatgatggtgtataccatcatgataagcgcaccaatcaccgcgtttctaatataaattctaagatatgcagccagccagtcatttaaattgaaagaaaaagctagtaaagctacaataattgcaccgcaaaatatgattataattagaggcttcaaaaacattgctgggtaagaaagcagtgttttaactttggaatacccccataacttttgcagcagaagccgtttgcgatttttaattacaaaataaaggacaccaataaacaaaatcagcatagaaagcaacactagcataagcaaagttttgttaaacataaaagcagtattctcagtgatgttttcaaaacttacttcaccatagtcagcaaaaaaggttttgtgctttctccaataccttgtcatcgttagatgaaatataaaatttgcttcctatgcctatattctttatttggttaaaatcaaaatatctgattttccatgtcgagagtggaaaagaaatgctgccgatcatcttctgatttgaatgatctcttagaaaatttgacacaagcttattgccgttatatattgatggttcatttttaggatttgtagaatagatgtttaagctcttctcatctaagaaattgtattgagaaatgttcactttgttttctttggagaaggcgaccaatctctttacaaagtcctcacttttaaattctgaagtataattgattatcaatgcttctttatttgagaataaagtgtaatagatttgtttgttaagagtgtaatgatagcttgacatattcattgagagcaaaaccagaatgaacaatatgtagattgttttcttcattggacagcctccataaaaagaaatccggtgctgtcttgtattcaagtttgaccacaccggaagaaaaatttaaaaatcactttgctatcgttttctttattttgtatcccaaaaagccttgtttccaaaaagggtttgatacacggaagcgtaggtatacccttcatcttttttcttccattcggttacctgcggaagcatgagtgatccgataatgcacagttaaaaatttcagtccgaacagccacatatgatgaacggccttcaggcttgtttcgctctgggctgaaataagaaatgtctctgccagcggaagatgacacgtcccccatttcgtctgcagataaatcccttcatcacccgctccgctttttcgccgtctgcttgtcaaaagaagattctgcttacgcgcataaggctttaaaatgcccgtcatttggccgtacggcagcggaagagagatattcatgtatccttccccttttgccctgtacgctgaatacagcgcagtaaaaacggtttcctgcttttcatttgttctgatccacgcacggacattttttctgccgtctttatcagagtcaactcctataatatcactgtgcatgatataccaatccggattcatggacaggtgaatctgccccgctcttctgctgaacggctcgtacacgcgcgcgaacggacgaaaccatccgctccacgtcacttttgccatgatgtcataatcaattgttttttcataaaaggaaataacggccggcgccagttttttagttgaaaagtcttcagaatgcagttctctcatctgatccagaaggccggtataatggatgtcatttgctgcatgaatatcagtcaaaaagtctttgcctatcgttctcttcccgtaaatacggctgaacgttctttcgctgccctcatcaaacggtctcggattttccaacctccaccccgccaaagccggcaggataacgccgaatgcattgacggccccgtgaatccaaatcatctggctgatcgtgagcgttgcctcctcgcggtagacaccgtacgaatatatcaaagaaaaagcaattgtgatcattaacacagccgaagaactcctgatcaagatcctgcctgttttcgtaacaaacggcgccgtaaagacgagatatgcatttacatacagacccgccagatacagagcgacagcaatcacatcaagtgtctttgaaaatgtaatccccaaggcaataaggatcggcgaaatcaaaataatgaccgtgctccatctgtaaagaacccgtttctcccgtatgatcctgccgagcaatccgttaaagatcggaatgagaaaagcggaatagtgaaagtgcaccgccgtcagcagaacgataagcgggccgaaattcatgacgggaatctcaaggacatatgcgaagaaccagaatccgcccccggccaaataaatgaaacccgccataacagacatctcttctgttctgtgaatatttgttttcatcagccgccggacagcatacagtgccagcccaaccgtataaatgagccacacaacggcaaaaaaactgaagtctgtgacaagcgcaagcaccgcacataaagcggcaacaggataactccgtaataacacattctctaaggtctttgacggtcgaaaagcaaaatcgaatacagcgggaacgaaaaaaagtacggaaaataaaacaaacatctcagcagctgatatatacggagcttcagccgccgcaaatcccaaaaagcaaatcacgcttaccatgagatgacgcttcagcatgtttctccctctgtttcccggaaagtcccccggtaagagaaaagcgtgccgagtatccggttttttacatgaacctttatgctgaagcaattcatttcctcatcataagcctcataaacggttgaactgccgcacagccatgccggaagcgggattttctttccgactatcaggagccactgccttccggatgtaataacaagccctccgtctgaagacgcttctaaatgcagttcagacagtaggatgcggggtttgccgaagtaatcaagaattctgttttcccgctcatcatactccatgaccgcatcaaaaaaacgcggtttgcttttaaagaaaaaggtacgattccattccacgccattttgcctgtttttgttttcgatagtgaaagggatatcgtttcccctctctgagaaaaaacatctgaaaaaaacacctgtctttaaaagcattctgacaagaaaagaacctccctttatttctgacataacgccttctccgcaaaacgtgcgtgatccgtcaaatctgtaccgtttctgcagcatcgggtgcagtgattgataatgagtaatcgctttttcatacattgaatccgtcatttcacttctctctttcgttttgtatgccaggcgctcggcagcttgagcttaagaatcattgcggctatcgtaagcattcctaatgagatcacgaatccgccgcccgaatatagcagtgccgttacacaaaagaagactgactgcccggtgtgaatcagccactttctccgcatgggaagcagccataatacccctaaccctgtctccagcgctcccctcacgatctctgcatcggcacagccatcatgaaagccttgaaaaaaccaatacagactgaatacgagacacataaagacatagacaaacccgaaacggactgatatcttcggatgtctgttttgttctatccaaagccgcaacgcatcaaagctccatgcggtagcccagcttagcagaggacgaaataaaaaccggtctatccaacttcccggcagaccgcgggccgtttcatattgatattgagtcaaaaatgcggtttgtccgttatcccgctctatatacttccagtagcccctgccttcttttataagtgacagcggatgatcagaggcaaaagcgagcgaagacactctttctgacgagcgagaccttatgtcacctattgattcgcccgtgccggataccttcagcccaaaaccgattcgtgtttcatatagaaatctctgcggttcatctggcagcctatgaagatatgtaatgtcagaaaaacgcagatcccattctttatgaagatgcgggttttgcgtatattcccaaagcgtttctatatcagatgcaatattgatttcgacatatatcggcttctgtttcatgccccctcctcttcccttcttttgtaaacaattcctatattatcataggaacagatcaagcggcagaacgaaaaggccatcccgttatcggcaggacagcctcagtggctttgatgacttatgaataaggtatcgtgtcttttttatcttcagaagcggtttgaatgataatcgggcgcacaaaacggattaccgcagccgaggccaaagcggctaatccgcctgcaagcaaaaacgccccggagaatgatccgcttttgtccgcgataaagccggttaaagcaggcccgataataccggccgtgtttgcaagaaaatgcataaagccgccgactgatccgacattcctttgatcaaccacatcatgaatcaccgcccaatagatagagcccgttatatataaaaagaagactgataaagcaacgagaataacggcacttacggtagtggtaacaagtccggcaaatccgatcagtacagcggaagcgaacaaacaagtgacaagaatgactttccgtgagaacaaaaccccttttccggcggtttttttgaatacataatcagaaatcattccgcctgccgccaaaccgataaatccaagaatccagggaataacagtcaccacgctcataaattcaacacttaaaccgcgttctttcaccagatagctcggaaaccatgttaagaagaaaaataagatgtaattgtaggcgaaaaaggcaaaagctgtgaagagaaccgttttttgtttcaaataaaaggtcatcgggatatgctgctcatgcggttgaatctccgctttcattgccggggcgtcttccgtcggcgccggccgttctttgacaaatttaaaccagatgaccgcccagactaaaccgatgatcatgatcaggacaaaggaaactttccagctgaacgccacagcaatcatcccgacaatcgggccggaaatcgccccgccgagcggcgttccgctgtttgtcaggccgatgaccgtggcgcgctgagacggaggaaaccaattgttgaccattttgcttatggcagccgacagcggcccctctcccataccgaataaaacacggataatcaaaagacttacaaatccgaaagcaagcgcaaccgctccgctgaaaagagaccaaacgatcatcgccgtacacaatgtcaatttagccccgtaccggtcagatgcaacaccgccgagaaagttaaacacagcgtatccgacagaaaaactgctgaaaatcagccccatttgggttgccgacaatgtgagatcctgctgtatgaacggcgctgcaatagacagcgctgagcggtctaaatagttaatcaccccggctgaaaataaaagaagaagaatagggaatctatcttttgagaacataaaaaaatccccctctcatttcgcaatattcagacatttaaattgccggagtaaaccggtttatgcaatgaaaccggttatccggattgccttgcgagcaacgccggtttatagcggtaaatccgtttttcaccgccatctttttcttgtatctggcgaagaagaaggcttcccgcttttcgtgccatttctgccgcaggctggacgatcgtcgtaattggaggagtaaaaaaacccgcaaaaggaacttcatcaattccgatgacggctgccttatccggaattgtcatatcatgctccttcatatacttcagcacctcaacaagaacgatatcgtttgccgccaatatcgctttcggaggctcctcaagtgagaacagctctgacaaaacattggaaatatcagctgcatcggctgttttgatatattcgtcccgcaccatcattccgtggcggtcaagcgccttcttatacccttcaatcctttctaccctcggactgatttcccgaataatagacgtcgtaataatcgcaattctcttaatgccgctttcgataaaccggtcaacggcaagaccggctgcatgatggttatcaagcatcactgtcggaatcccgagttcttcaatggttctgtccataaacacgaccggaaacgtatcacgtttcatcttttcatataaagagagattttcgcccgtcggaaaaataataattccgtccacctgcttagcccgcagcatttcaatatatttcttttctttttccggttcatcatccgcattgcagacaataatatgaaatccttgttcatgaaaatagtcttccaccgccctgatgacctgagtggaaaaagtgtgaagaatattagccaccaccacacctactgtaaatgttgatttctgttttaagctgcgggcgacgaaattcggctgatagttcagctcttgaatggccgcttctattttttgtttcgttttctcgctcatatagtcatagcgctgatttaaaaattgagatacggtgcttttagatacgtttgcatatttcgccacatcagaaattgtaatggttttcatagactcatccccgtctgtcttcatttttcactagtataagtcagaagtaaatggtttacaatctgacagggacatggattctgtcacactccggaataagccataaaacctccgtcgacgggaacggtgaccccggtgacgaagcctgagcatgaatcatccgaaaaccacaggagcgttcccagaaggtcttccggtttcccgaaacgtttcatcggtgtatgtgccataatcttattggatcggtctgtcagacttccatcttcctgtaataacaacccacggttttgcgctgtcaaaaagaaacccggagcgatggcattcacccgcagccctttttttgcgaaatgaacagccatccacatcgtaaaattctgaatcgccgccttggccgcgctgtaggcgggcacctttgtcatcggtgtatacgcactcatagaagaaatattaataatcgcgggacattccgccttcaaaaggtcttttccaaacacttgcgatgccagaaatgcaccggtaaagttggttgaaaatacgctggaaaaccccgtttcgtccatatcaaaaaatgatgtgccctgctcatcctcttcatacgtctcgctggcagtgatcgcatcagggtggtttcccccggctccgttaattaaaagattgacagaaccgaaccggctgataatctcgtcttttgccttttcgagcgaatcacgggctgaaacatcagccggtacagaaatcgcggttcctccagcgtcagcaatctcgcccgccgcacgctctgctttatcagcattccggctgacgatcgcaattttcatcccctgccgtgaaagctcctttgccattgctgaacagagaacaccgctcccgcctgttatgacagcggttcttcctgataaacgttcatgaatcggtctcatcccttcacctctttctcatgagacgagaacgcatcccacagtccgttcaagtacataattcctaaggcacgatcatataaaccataacccggccggcattgttcgccccagatatgacggccgtgatcaggccgtacatatcctttatagccttggccgtgcaattcttttaccacaccggtaatatcaatggacccatcactggtaagatgcgaagtttccgtaaaatcaccgttatcgcagattttcacatttcgtatatgggcaaacggcgcagctcccgcatagtgtttggcgatcttcaccatatcattggcgggattcgctcccatcgaacccgtgcacaacgtaatacaattggcgggtgaatctgaaatctctcgcagcttttcataacttttctcaccggtaataatacggggcaggccaaaaattgaccagggcggatcatccggatgaatggccatttgaatgccgtgttcctccgctacaggaaggatttcatgtaaaaagaactcaagattggcccaaagctgtttttcatcaaccgtttgataggcctcaaacagttccttgatccgggccattttctccggctcccacccgggaagcgtcaaatcagaagattcttcaaccgtgcggatgagttcctccggagggagactttccactttcgctttttcaaaaaacaaagcggttgacccatcctccagcgcgcggaacatatcggtacgcgtccagtcaaatatcggcatgaaattgtaacagatgactttcacgccgaattcggacagattgcgaatggtctgtttatagtgctcaatatattgtccgcgttcttcatgaccgagtttaatggcttcatgaacattcacgctttccacgatctctgcatgaaacccataggattgaatgtttctgacttccgcttcaatgtcctccttttcccatacttcgcccgcgggcttctggtgaagagcccagacgatgcctttgaccccgggaatttgtctgacatgttcaagagtcaccgtatcattaccttggccgtaccagcgaaacgtgatattcatgttacacccccgtatattcgttttttcggcagacgtattctttgctgagggatacggcagcttcatagccgcccttttgatatgcttttgtcaagtcgcttcccacaccgaccgcgaccgctccggcagagagccagtcattcatgctgtttaatgagatacccccggtcggcataatgcggacattcggcagaggaccgttgaccgacttgataaatgaagggtcaaacgaattagcggggaacagctttaccacatcacatccggcttcaagggccaaagccatatcagacacactcatgcatcccggaagatacggtacgctgtactggttgcatagagatgctatctcttttacaaaatgagagctgacgataaatgaggcgcctgataaaatggcgtgtctcgccgtttctgtatccattacagaaccggctccaagaagaatatcttgatgccggagttccttaaagacatcttccacttcaggagttgtgtatgtaagctcaatggcgctgatacctcctgaaatggccgcttttgaaacttcaagcgcctcttggctgttttgtccccttatgacagccaccacttgtgcatgcagaagtttttcgtaaatggcgtacttaggcagcattctcgctcctcctttaatcaaacgtaatgattgcttttcccaccttgtccgggtgctgttcgatcaactgaaatgcttgatggacgtcatctgctgaaaatgtatgtgtaataagaccgccgtgcgttaacaggcctttattcagtaagtctgtaatgtacggaaactgattcgtctgcaatcttgaaccggttatcgtgacttccttttttgtgatcggaagctgagaaatgccggcagtcctctcatcaaaaccaagcacaaccacatgaccggccggagacaccgcgtcaatggacgtttcaaacgttgaggggagacagacggcatcaatgacgacattggcgccttctttttttgtccattcgttcacccgcaaaacgggatcttctttttgcgcgttgacggtaacgtccgcaccgtttttttcagcgaatgccaagcgttcatcattcaagtcggttatcatgacagtagcgcctttgaactttgccatttttaatatgcagattccgatcggtcccgctccctgaatcaaaacggtatcttccttctcgacacggcctctccaaacggcctgggcgccgatcgtatatggttctgccatgaccgcttcctcccaggccagatcgggggaaacggcatgcagctgcttttccggaaccacgatatattcccgcatcccgccatcttcatgaacgccgaacaccgaaagcgctttgcagacgttcggacgtcctttccggcaggcatagcatgttccgcaataagatatcggttcaaccactacgcggtcacccggcttgaaacgccggacatgagaaccggtatttgcgacttcccctgtaacttcatgtccgattactctcggcagggacgctaacggatttgtcccatgataaatatgcaaatctgatccgcaaattccgacccgcttcaccttgacaagaacatcatccgcgtggacaacagacggtttctcacattccgtcaccaccagatcaaatgctttccgtactagaaccgctttcattttctcacccgctttttaagttgtgcttgctaccgttcaatcacagtctctttgtttacaaatgacagaacctcttctagatagggaagcccttcattgtcaccggaaactgtggtgacgagcgcaccgaccgcattggcaaactccagacgtttttccggttcaaaaccatgcagataactgtacaggtagccggcattaaagccgtcacccgctcctaccgtgtcaacaggcgcaaccgggaaagcctctttgtgaatccacttatgatcatgatacagcgcagaacctgcttcaccgtcttttatgacaagctgactgattgaataggtctctgcaaaccgggctaatgcttcattttcccctatacctgtcagctgtttcatttcgtcccggcccgccagaagaatatcagtatgcggaaagatttgatgaaatgccgcacgcgcctcctcgatcgtccacagcttcagcctgatattcggatcaaaagatacgggaatccctcttgctttggcgatggaaagcaccctttcagcaatttcaagatttttcttatcaagcgcgaggaacacaccggtaagatgaacaatgtgaatgccggcaaacatattctctgttatatcttccggtgcaagagtcagaattggtgaattgaaacgataataaaacgtcttgcctgaaccgtcatttctgatctctttgacatttaaagatgtaggaaagccttcaacataggagacgtcagtcacatcaattccttctcctttggcaaactgataaatcactctgccgaactcatccttccccagtctgctgacccactttgagtgcagattcaatctggcgcatgcaatcgcaaaattcagttcagctcctcctgcttttcgttcaaaatgggtaacaaaacgcaaaggtcctgtgcttgcgggatttaaggtgatcatcgcatcaccgatcgtaaaaatgccataatcagaagccacatcaatactcctttcttttaagactaaatcggtttggtaaaccggtttagtaaaactttatatgaaaacccttacacacgcaagagaaaaatacaataaattcaaaaaactgttttcggtaaaaataacccggtttttcacatgaaaaaaccctcacaacaaaatgtaaggggtttttgaaaattgtatgcatgtttccttagttagcagtcttacgttcggggcttgtaccttcttcttccgcccatgtttcaatatgcttgagctccggggtattctcggctttgaatacgggatcaagaccttttttgcgctgagcggcataatccttatagatcttgtaggctacattactcagcagtaaaattgccactaagttaatgagagccaagagtcccataaacaagtttgccatgtcccagacgatctggaagtcagccaaacatccgtataccaccatcactacgacgaatacgcggtaaatattaagccatgttttgcttgttttaataaattcaatattcgtttcaccatagtaatagttgccgaccacagagctgaatgcgaataaaaacatcgcaatcgcaataaatgtcggggcccagccgccgaggtggtgctgcaatgcggcttgtgtcacttggatgccgtcgcctttaggcgtaaagctgtacaataaaatgataaaggcagtcgatgtacaaacaataaatgtatcaaaaaacacgccgagcgtctgaattaatccctgcttagccggatgcgacacatgtgcagccgctgcggcattcggcgcgcttcccatacccgcttcgtttgaaaacaggccgcgctgcgcaccgataataatgatgcttcctaagcttccgccgacgatctgttcaagaccgaacgcatttttcacaatcgtaacaaacagctcaggtaccgctgtaatatttacaatcacgacatacagcgcgatcagaatatacatgcccgccatgaccggaacgattaattgcgaaacggaaacaacacgtttcagaccgccgaatataatgaaagccgttaatacagctaaaatgattgcgataactgttttattcacatggaatgcttcgtcaaacgccacagaaatcgtatttgactgcacggcgttaaagataagtccgaaagaaacggtaatcaatacggcgaataaaataccgagccagcgggcgcccagtcccttagccatgtaatatgccggaccgccgcggaattcgtcaccggaacgcactttatacagctgcgccaaggtgctttccacaaagctggaagccataccgacaatcgctacgatccacatccaaaatactgcgccgggaccgcctgttgcaatcgccagcgcgacgccggtcaagtttccggttccgacacgagaagcggctgagataaagaatgcctgcattgaagacactcctttattcccttgcggcttctccccgacgattctgaacatttcaataaagtattggaattgaataaagcgaaaacggaacgtaaagtacaatccgatcccgactaaaatataaacaagatacttccaaataaaatcatttggaacatttatgatttcactgatgaaagcctccatgtttaacctcccttttacatatcttttactgtcatttttgctgcatatgttagatcttttaacacaacgagtattattatatcacaacaacagtggttgagaagtttttttaagaaaatgtttcggtttcttcatcacgtcttttgctgtcatgccccgttttttatcttacagcctgaaaaatgttgtcacgtcataaggaatgcgtgcatatcataacaaataggtctttaagaaaaaagagatgaaaagatggatggaatggtatatacttaaccaggataataattttttaaatttaataaatatgtttactttacatttaaattagggtattataataaaaatattcagacttatgaaggggggagaacatttgaaaaaaatcttgtttttaaaagcttctattttatttttagcgattgcaagctttcatttgctctccattccccatgcgtttgatactgctcatcattttaaagcggtagccgaccagcaggaaatgcacgaaatgaaggccggccaaaatgctgatgatgagaaaaaatcgctgacgggctcatatatcttgacggcgctttttgccgcttctgtctcactgatcgtgatatcagacaggagacgccccgcttcccggagaagacagcgaaagaaaagctttttaatcgctaaattttatcagtcctcgtatttcgatgagcttcatgttcaacatcgcctatctatgtaacataaaatgaggaggttgttaaacatgttgtttatcttacgaatggtgattttagggttgttttcattcactgcattgaatttatttgtatggcagggaatcgaagtcattcacgctatcactgacttattcggcagccatgaaagctaaatagtaaaacctccgctcaatgagcggaggtttttttattttatttttactcttaaacatcagacgcggggatacgccatacatctgttaccggccctgtctcatcttcatcggtaaagaaggagccgttgctgtatcggtcattcgcccgcaaggacttcacggcgatttcaattctctcgcctttttctgtttccgcagcgatcatgtcggctaaagcgcacgcgaatacgccgactgcgcgatgcgggttctttttaagctcacgcagcatgatgacaccgcgcttcgccctggatgttttttcgaattcagataggttcatccgcttgattgctccccgctgtgtgacaaggacaagcgaatctgtctcatgcaggatttgtcctgatacgacggtatcaccgtcttttacatttatgccctttacgccggccgcacgggcaccgactacatttacttcatcttcaccgaaccataaaccgtacccgaggcgggtggcgataaacagctggctgccgccgtctgtgacatgaacatcaatcagctcgtcgtcccctttaaggttaagggcaacaagcgctttcgagtaacgctgcgctttgtaatgcgtcatttcagttctcttcaccatgccgtttttcgtcataaacaataaatatgaagatggatcaaattcttttaccggtatagctttcacgatggtttcatcacggtcaatcgtgatgatgttcgttacgtgctgccccatgtctttccacctgatatcgggaagctggtgaaccggacaataaacatagcttcccttattggtaaagagcaggagaacatccgttgtattcatttcaaattggtgaatcagcctgtcagtatccttcataccgaaatcctggccgttagaagcggcaaatgaccgctgacttgttcgttttacatagccgtcttttgtgactgtcacatatacgtcctcagaggctaccatgacttcaagattgattttaatttcctcaatcttttcttcaatgacagaccgtctgctgtcagcataggtctttttcaattttttcaggctgcttgtaatgacttttaacagctttttatcatgacttaaaatggcttcgagctcctgaattttcttgctgagctcttccgcttcctcttttagcgccgtaatatccgtgtttgtcagacgatacagctgcaaggatacgatcgcttcggcctgcggctccgtaaatgtgaatttagacattacgttttgtttcgcatctttcttgtcgctgcttgcccggatgacggctatgacctcatctaacacagacagtgccttcatcagtccttcaacgatgtggtgccgctcttttgctttttgcaattcaaagacggagcggtttgtcaccacttccttctggtgggaaatatacgcatccaggatggccgtaagactcatcagcatcggccggcggttatgtatggcgaccatattaaagttataagttgtctgcagatcagtgtttttatataagaaattcaaaatgccttttgcatcggcttctttctttaactcaacgaccacccgaagccccgtgcggtcagtttcatcccggacttcagaaatgccttcgacttttttgtctatgcggtattcatccattttctttacgagattggctttgtttacttcaaacggaatttctgtaatgacgatctgctcccgtccgcctcttacggattccacttcagccttgccgcggataataattttgcctttcccggtttcataagccttccgaatgccgtcgactccttgaataatgcctcctgtcggaaagtcaggccctttaatcacctgcatcaagtcatcgacggtgcaatccggagattcaatccgtttaatgacggcatcaatgacctcacccagatgatgagggggaatatcagtcgcatagcccgctgaaatcccggttgatccgttgacaagcaagttagggaacatggcgggcaaaacaaccggttctttactagtgtcatcaaagttcggaacgaattcaaccgtatttttatcaatgtcacgcaaaagctctgatgcgatagaagataatctcgcttccgtataacgcatggcagccggcggatcaccgtcaatgcttccattgttgccgtgcatctcaatcaggacattccgcactttccaatcctggctcatccgcaccatcgcttcataaacggagctgtcaccgtgcggatgataattaccgataacgtttccgaccgttttcgccgctttacggaaatttttatcgaaagtatttccgtctgcgtgcatggcgtataaaattctccgctgcaccggctttaaaccgtcacgagcatcaggcagcgccctgtcttgaataatgtatttactatagcgtccgaaacggtcgccgattacttcttctaacggtaaatcatgaaataattctggctgtgccactattaaacctcctcagcgaccgacaagttttcattttctaaaatattgctttcctcatctaatccgaaggcaacatttttttcaatccattttcttctcggttctactttgtctcccattaatgtcgttacacggcgctctacccgtgccgcatcgtcgatcttgactctgacgagcgttcgcgattcgggattcatcgtcgtttcccagagctggtctgcgttcatttctcccagacctttatagcgctggatggtataccctttgccgactttctttaaaacgccgtccatttcttcgtcggaccaagcatattcaataatctctttcttaccgcttcctttgctcactttgtaaagaggcggaagggcgatgaagacttttccgtgctcgattaaaggtttcatatagcggtagaaaaacgttaacagcaagacttgaatgtgcgcgccgtcggtatccgcgtccgtcatgatgatgatcttgtcataattgatgtcgtctatctcaaaatctgcgccgacaccgcctccgatcgcatgaataatcgtattgatttcttcatttttgaagatgtctgcaagctttgctttctctgtgttgatgacctttccgcgaaggggcagcacggcttggaatttccggtctcttccctgttttgcagaacctcccgcagagtctccctccacaagatacaattcattcttcgccggatttctggaaccggccggtgtgagttttccgctcagcgtcgcttctgattttttgcgttttttgccgcttctcgcttcttctctcgctttacgggccgcttcacgggcctggcttgctttaatcgcttttttgacaagcagggttgctgtatcgcggttttcttccaggaaataagcaagattctcggaaatgacggcatccgcggcggatctcgcctcacttgttccaagcttccctttcgtctggccttcaaattgcagcagttcctccgggatacgcacggaaatgattgcggacaaaccttccctgatatcggcgccttcaaggttcttgtctttctcttttaaaagggctacctttcgcgcatactcgttaaacgctcttgtcattgccgttttggctcctgattcgtgggtgccgccgtcctttgttctgacgttattaacgaatgacagcatattttctgaatacccgtcattaaactgaaacgcgaaatcgacttcaatgtcatgatgctcgccttcaaaggaaaccacttcgcataaagcgtctttttcctcgtttagataagcgacaaatgcttcaattccgttctcataataaaatacttcttttacgccgttccgttcatcaattaattctattttcaagccttttaacaagaaagccgattcgcgcagacgttctgacagcgtgtcaaaattataaaccgttgcgctgaacattgacggatcaggtttaaaatgggtaagcgttcccgtttttttggtcgttccgattttttcaagtgaagtcacgggcttgccgccgttttcaaaccgctgtttataaacatatccgtcacgctcaatagtaactgtcagccactccgataatgcgtttacgacagatgcgccgacaccatgcagaccgccgcttgttttatagccgccctgtccgaatttccccccggcatgcagcacggtgaaaataacttccggcgtcggctttccgagcttatgcatcccggtcggcattccgcgtcctctgtcttgtacggagatgctgttgtccttatgtatcgttacgataatatgatctccgtagccggcaagaacttcatcgacggaattgtcgacgatctcatataccagatggtgcaggccgcgtgcgtccgtcgaaccaatgtacattcccggtcgttttctgacggcttccaggccttcaagcacctgtatggcatcttcgttgtaatcaaattgctgttttctagccaaacgtacaaacccctttcaaaaaacctgctcttaatcattctcttttttaaatgttttcatgtctttgtttttcagtatgcgcaagcttcggtccaattctcctcggactcacaattataaccaatatgcttgatttcgcaacatatttaagcgaatggctcgttttttaggccgcaagacatacattcgaacggcttttcatctttttggtgccctttttggcgaataagaacatgagttcgctttctattatatagctttatgcgggccatcgcaaacagactgtaaacccctgtataaaggggtttctaaaaaagctgttcatgctttattgtatctgtttcatcatcatacgcaaagagtattctttcaataaaaaagcaaaaacccctgatttgccaaggatttttgccttttttgttcctattttataacagcgcgggcgacttttatacataaatccataacagccgtccgtcctttgtctgtaatcatgcgatacgcttcttcatttgcaaggccctgctgcgcccaaaaaacgggagcgtccgtctgtaaaaattcttcagcgacgccgggaagctgctcagagcgtctgaacacattcacgatatcaatcggtccctccacgtcttttaatgaagcgacggctttaacgccaagcgcctcatcaatcgttggattgacgggaataatttcatacccttcattctgcatcgctttggaaaccatgtaagaagtccggtcgggacggtctgacagcccgacgactgcgatccgtttgctccggtccagaatttctttaatctctgattttgaaggattttgcatctttaccatctccttttgatatattgtacatgaccgcttcgccggaatcaaaaaaagcgctttgtcagcttaattctcaaaaaacttgtcatcagacggtaacaactcgtgttaaaatagagtgaagggacattgaaaaggagaaatgtagatgttgattgctttattgattattttggcctatgtaataggcagcatcccgtcaggtttaatcgtaggcaaacttgcgaaagggatcgatattagagaacacggaagcggcaatttgggcgctacaaatgcttttcgcacgcttggcgttaaagcgggatctgttgtcatcgcagccgatattttaaaaggcaccttggccgcggcgctcccatatttactgcacgtccccattcatcctcttctcgcaggggtggcagcagtaatcggccatgtattccccgtgttcgcaaagtttaagggaggcaaagccgtagccacatcagggggcgtcctgctgttttatgctccgctgttattcgttacgatggttgtagtatttttcgtatttttattccttacgaaatttgtttctctgtcttcaatgttaacagggatttatacgattatttactgtctgtttgtaaaagacccttatttattagtcgtagtgacgctcttgaccgcgtttgttatctacagacacagggcaaacatcaaacggattataaacaaaacagaaccgaagatcaaatggttttgatgaaacttcaattttgacatcaaaatgccatatgcgtttataatagagataatttctttatatgagaaacaaaaagggagtgttccggatgaacatgaaagtaacgaaaggcgcgctggattggtacaaagaagagctcgatctggaaacaggcgaccatgtccgtttctttgtccgttacgggggatgcagcaacgttcagaaaggcttttctctcggcattttaaaagaccggccgatgaacatcggcaccagcacggaagttgaaggcattaccttttttattgaagaaagcgacttatggtactttgataatcacgatttgtcagtcacatattcagatcaggcagaagagccggtatttgattacgtgtaagaaaaaaagaacgcagcggatgcgttctttttttacagcctgaaccttttgagatgatcagtcagatgttctttttctaatatgcttctttgcgtatcaccgagcaggtcaaagtggggaaattcatttttatggtgaatccactccggcttcagcccatactcagctccccatctgatcagtttattgagatcgcttgaaccggccttcgtcacggtcttagcctccggaaagcggtcgtccagccagtaatgcgttaaaaaagcgattttcccttccgatacatcccgcttccatctttccagttccttacgcgtaattccaaatgccataactgcagccgctccttatttttttgccttttcgtaagcggcatgccaatcaggaaaagccttgcgaaactgaatcggtttgaagctctctttatcaacgcatatatgagaggatgtcgctttgatggcaagttcttgatccggattatagatgtggtagccgtaaacggttttaaatccgttatattcttcaatccaagtatgtacgacagccgtttctccgtagcggagcggctttttataagaaatgctgatatccaatacaggggacagcactcctctgtcttccatatccttgtaaaggaatccgagttccttaatcagcgccgttctgccgacctccatccagactaagtaattggcatgatagacgatacccatttgatctgtttccgcataacgcacttctatttctttttttgacacatgcaacgttctctgctcccttattatcagattagccccattttatcacaacgagccggaaagagaaaaaaaccaggtttccctggtttttattatgattgatagccgttttctcttgcagccgattcatcctggatttcactgcggaacgattcaatgctttcattgcgtctggcattcttctcttgaatgcgctgtttttcctcatctgtcgcaaattccattgattctttggcttcttctatattttcaattgtattctgcaccatatcctgcagcttttcaacgttatcggaacggtcatccggattcggtttttgataattgtttgtcataatgtctgctctcctttgatgatgttattcgcctttcgtctgcatgacaatcggatgtccgtttgacttgtcatgaaacttttcccctttgttgcgtttatatttaacgggttttgtccctaagtggctcggagcgtattgcggctggccgtctttcttgtttatgcccatgttcatccctccttaagagtatattttgcaaaaggaggtgcaaacatgactgcaaattaaaggttatttttgtttgaaccgctgctccagcttttcttcaagctgattcaaatattccgtattggtcatcagctcacgtttattttccataaccaattcatgaaaagaacgttttcgcatttttttcaatcttctcacctccgtgttttcattcattttttccaatttttcaaaacctaagcccttcacaataaaaaaactgaacctctatttgagatccagtttttctttcatttctttttttgtcatcgtgcctacgcgaatatgctgaatggttcctttttcgtctaatatgtatgttgtcggataagaaagcacgttgaaatctccgttaattccgcttttgtcaatcagaataggaaaggtcagctgataatgatcagcaaatgatttcacagcctgtatatttttttcagaggatgtaaaattaacggctgctaccgcaatatcaggatattctttctgcagctcctgcatatcgggcatttccattcggcacggcttacaccacgtcgcccagaaattgaggagcactttttttcctttataatcagaaagggagatactttttcctgacaatgtatcaagtgtaaagtcaggggctttcatcccttcttctgtcccttctttcggacttttttgtacagaataaatgttccagcccgcatacactaacaacccgataagtaacattccgcccagccatttcgcaagcatctcaaggcctcccgcataaaaagagagaaagcagactgctttctctcctttgttcattctgctactgtttcattttatcgcgaagcaccatttgtaaaatgccgccgtggcgatagtaatcaatttccacttcactgtcaaaacggacaacaacttcaaatgtttttaccgtaccgtcttcactgattgctctgacagtcagcaagtcgcgcggacgtacagattcatcaacatccacctcgatgacttccttaccggttaagccgagtgtatccgcgttttcaccctgtttgaactgaagcggcagcacacccatgaagacgaggttgcttctgtgaattctttcaaagctttcggcaatgactgttctgatgccgagcaggtttgttccttttgcagcccagtcacgtgaagagcccattccgtaatcttttccggccaggacgacaagacccgttttatcttctttataccgcatgcaggcatcataaatagatgtcactttcccggtaggccaatgtgttgtgtatccgccttctgtacccggtgcgatttggtttttaatgcggatattggcgaatgttcctctcatcatgacttcatggtttccgcggcgtgagccgtaagagttaaagtcacgaggagaaacgcctttttcctgcaggtatttgcccgccggtgtgtcttttccgatcgctccggccggagaaatgtggtcagtcgtcacagaatcgccgaatttgccgacaacgcgaagtcctcttaaaggctcaacttttcccggctctacagacatttcctcaaagaacggcgggttttgaatgtaagtggaatcctgatcccacttgtacagcgcttcatccgtcgtttcgatttcgttccagcgctggttgtcgtcaaataccgtttcatactctttgcggaataattccggcgtaacagtctgtttgacgagagaattgatttcatccatggacggccagatgtcatcgaaataaacattttgtccgtcatttccgacaccgatcggatccgttttcaggttgatattcacagtgcctgctaatgcgtatgcgacaacaagcggaggtgacgcaaggtagtttcctttgacaagcggatggatccggccttcaaagtttctgttacctgacaagacagaagtgatcaagagatcatttttagcaaccgcttcttcaatctctggagaaagcgggccggagttcccgatacatgtcgtacagccataccctacgaggttaaagccgagctccttcatgtaaggaagcaggcctgagttgactaagtatccagtaacaaccttagaccccggtgcaagtgatgttttaacataattcggcactttcaagcctaattctaccgcttttttggctaccaatccggcaccgattaatacataagggtttgatgtattcgtacagcttgtaatagcggcgattgcaatcgcccctgttttcataaccgcatcttcgccgctgttaagtttaaatgaaatttctttgttctcttcagcagcatccgctccgaatccttggttgccggccgggctgacaagatgttttttaaacgtttcctgcataacggaaagcgggattaaatcctgcggacgtttcggtcctgataggttcgcttcaatttttgacagatcaatttccacaacgtctgtaaaaatcggctcttccgcgtcaggcgtatagaataaaccgttgttgcggcagtatgcttccacaatatcgatctgctcttcttcacggccggtcagacgcaggtaagaaagtgcttcctcgtcaaccgggaagaatccgcaagtcgctccgtattccggcgccatattggcaatagtcgcccgatccgcaagcggaagctcagcaacaccaggaccgaagaattcaacaaatttattgactacacctttttcgcgcagcacttgagtgactttcagcgccaagtcagtcgccgtcgttccgttaggcaattttccgacaagtttcgcgccgatgacctcaggaacagggaaatatgaaggctggccgagcattcccgcttccgcctcaataccgccgacaccccagccgaggacgccgattccgttaatcattgttgtatgggaatctgttcccaccaatgtatcaggatatgtcacaagttctccgtcttcctctttcgtatgaacgacacttgccaaaaactcaaggtttacctggtgaacgatacctgttgcaggcggaacggcctgataattgttaaacgctttctttgcccagcttaaaaatttataacgttctgcatttctttcgaattctaagtccatattaatggctaacgcgtcttccgtaccggctttgtcgacttgtacggagtggtcaatgaccaggtcaaccggaatttcaggattgattttatcagggtctccgccgacagaagccatggcttttcttaaagatgccaggtcaactacggccggaacgccggtaaagtcctgtagaataacccgtgaaggtttaaacggcacatcgatatcttttaattcagcagtaccccatcttgctaaattttcaacatgttcttttgtaatgacgcgtccgtctacctgacgcaaaacggattccaaaagaaccttaatagaataaggaagttttgaaacattgccgacccctgcgtcttccaatgcttttaatgaatagtagttgtatgttttcccatttgaagaaaatgtttttcttgcttggaaaacgtcttgtgttgcgactttttgctgatttgtcatttcccaaaatcccccttcaatgatcaagatcgtcctttagatgaatgttcacattccatcacaattttctcacaatttcatcttagtataaaatcatacataagtaaatatcaatgtttttattaaatacaataagatcgtcttatcagcatgattttcggtaaattttgtccgattttccgcctcatacaacgggctgtaaagagccatattaatgttgaggtgatgatcatggtaaaacggaaagccaatcatgtcattaacggcatgaatgatgcgaaaagccaaggcaaaggcgcgggttatatagaaaatgaccagctcgtcctgacagaagaagaacggcagaacaataaaaaaagaaaaacaaaccaatagccggaacaccttaaaaaggaggctttaacatgacaaataaaaatacgagtaaagatatgcataaaaatgctccgaagggccataaccccggccagccggaaccgctgagcggaagcaaaaaagtgaaaaaccgcaaccatacaagacaaaaacataatacaagccacgatatgtaaaacagaccccgtgtctgtttttttgtgccattcacccattcaaagcttctgcatacgttatagcaaggctttttaatatggaggaatgcttccatgaatcactcaaaaaacgctgaagaatttgatgatacggaagaatggctgcggcagttttacgaggacccgtatgcttggtatgacgagacgctgccgatcgatctatatgaaacaagccgtcaatatatcattgaagccgacctgacggcgctgaagcaggtgcaagcgataaccgtcactctttcggggaatgagtttatgctctctgttaaaacgcttgaacggacgttaaacaaacaaatgatgcttcctttttatctgaatgacaaacatattttcactgatttcaccaaccatattctgaccgtctccatgaacaaggagccaaatgagactcctgcctctttttcctttcaatttcctctataacataaaaaagccgctttcatccctcaatggaagcggcttttttgtccggtcatatcagtcatataccctcaaagtgaaactcccatggccaaatagcagaatcactatacgatagaatatgttctaccaaccggaatgactggacatctatcattttttctattctttttttcatgtgttcttctattctgtcttcgtttacaatatggttaaagtaaggaggagatagaacaatgctggaaggctggtttatgtggtttattttattttgggtcatcgtgatgatcggattgctgtctatcggcgggttttttatgtttcgaaaatttttaaaacgcttaccgaaagaagacggccggtcagaactggattggcaggactattatattgaaaaaagcaggcacttatggaatgagggtgacaaggcgtttttggatgaattggtcgcccccgtgccggagctctttcgggatgtagccaaagcgaaaatcgccggaaaaatcggtgaactttccttagcggaggaagctgaacaaataaaccgtgatttaatcatcaggggttacatactggccactcctaagcgtgatcatcaatttttaaaaaagcatctccgtgaaaaacagattgatcttactccttatcaagccctgctcaaataaaaaacctttccggcgcacggaaaggttttaattcatctgaatatcagcggtcttcagttcattcgaaagtttgcggtaagacaaaaacatcgcgatgcgccacgggacaatcattccgaaagccagaatccaaaacattccgcttaaagctccgtaatcaaccgtcgtgctcaaaatggatttcatagcgattctgataaccaagagaccaatcaggataaacacaaacgcttttgaccgttttaaatagatttcattatttttaatctcaaatttagatgttttaatcagaaaaatagagaagatcacgcccagcgtaatggcctccaaaaattcttcgcccgtcactctgaaaatcggaaaaaggaacataagcgctcccgtactcatgaaaatcggcgggagaattatttttttaggtgaagcgggcttgtcggaggatttaatcctgacgatcatcacggaaattgccatggccgctgcaataacggatgaaattataatcatcatctttatcattcctttgcttgcacggagtttgatactatatactatactccaaaaacataaaaaaaaccaatttgaaaagagaacacgtttacgttcccgttacccggcctacggcctccagcactttagatgcttcaaacggtttaacgataaagtctttagcgcctaattcaatcgcttccagaacgatccgctgctgccgcatggcggtgcacatgatgatccgggctttcgggtcaaaagctaaaatatcctgcagggcctgtataccgtttttgaccggcatggtaatatccattgtcaccaggtcgggacggattttttgatatactgccagagcttcctcaccgtcagccgcttccccggccactgtgtaattcgccgattccagaatctctctgattttcaccctcatgaacttggcgtcatctacaactaaaactcgtgtcatattcccctccacatatttaacattaactagtcttattgtaccaaaaacaaaagggtatataatagttcaaaagttattaatccgttacagacccgtaaatcctccgaaaagatttgacagaacgatcagaatgtagctcatccagttaaaaaacagcataactccgatcagaatcataagaatgccgccgattttcatgataagcagctgatgcttgcgaatccaattcattctggtaataaaaaatgaaagaacaagaaaaggaatcgcaaatccgagaacatataaaaacatatacggcactgctgaagaaggatttgtattggccagcgaaaacacggctcctaaaataggcccgctgcacggcgaccagccggctgcaaacgcaagaccgatcagaaccgaaccgataaacccctccggacggcgcttaaagtgaatgcgccgctctttcatcatgaatttcggctgaaacacaccggcagtaatcagcccgaaaaggatcagcatgatagcgccaaactggcggatcgcttcatgatattgggtaaaaaaactgccgataaacgaagttccatatcccaatgcgataaaaatcacggagaaaccaagcaaaaaacaaagtgtatgcacaaggccgcgcttttgcagcatcaccttttctgttttcacctcgtccatactgacaccagttatgtaagataaaaaggcggggtacaacggcagacagcatggagaaatgaaagacagaaatccggccccaaacgtcagaaagtaattaaaactcacgatgacacactcccttcgagttatgacaaaatcatttcatttttttaacactttcccgagaaggattactttttatagaaaaagcttatataatttaatttgacatcgagatattatactccttcttatttgaaaaacagtataaatgtggatataataatagcgactcaggtgaaagatttatgtatgaaaggatatatccctgtgattagagagcatctattaaatgaaattgaaaaaaaacgggcagagctgcttaaaatcgtcatgacaaacggaatgacatcaaacattacgatagaactcagccaggagcttgaccaccttctcatacaataccaaaaagaactgcacaccggcagttggggtgaaacatgacgccaaaataaaaaaccctctccgggttttttatttttataaccatgtatctctatatcataatctgtacgtattatttcgcttgattattcatggctttcatcatttgattaattttcttttgagaaggtttcattcccatttgcatcatcatcatgcgtaacatttgttcattaataggcggattctttttcaaatagctcatcatatatttacgagcaataaaaaacccgagtgcaacacctatgagcaatgcgacaacgcccactaggatgccaacccataaagtcattttatttcctccttcatgttgtctagtttaaagtgtactaaaccaaaggctattatacaacatttacatctctttttcctcgtttttagacaaaatttctttctctgaccggatttaaccacccgtagcgccgtgtcttgaaatccattgcaagaaaacaggggctgattttacgcagaatctcaaagaaaatcgtttccgcctcataatctcccgaagccgcaatctcaattaaactgtctttcatcatgaaggtggcgcggcccttttctccgggcagtgtaagccggtaaatggaatccaaacggctgtaactcattcggtttaaatgcagctggagacgctgatgcatatgtatcaccggaatcggttccgttatatattgaacttgcttttctgtcaattgatattcatggggtgtcaggtctgtccaatgatagtctcgaaacaactcaaacatagccgtttcccgcccgaagtagtggttcgcaaactcatcctttatcaggtgcgtatagtaatgacgttccatttcctcatccccttttacagcgcttcgttattgctttctattatacaaaaggagaaaagaaagaattgtctattactgttacgccgccccttctatttttgtcgcataaacaggaaaaagaggatgatttgactcatcctcttttgtctcgttatttgtttaaaagttttttcacgcggtcaaccacgttttctgcagtaaacccgtattctttcataattgtttctcccggagctgaagcaccgaaacggtcaattgcgagaacgtctccttcaagaccggtaaatttaccccatccgaagcttgaacccatttcgatcgcaagacgtttcgtcacattcggaggaagcacgctgtttttgtactcggccgattgtttttcaaagcggtcccagctcggcatgctgactacagatacgtgaatgttttcttcagccagtttcgcttgagcttcgatcgcaagtccgacttcagaacctgtcgctaaaagaagagcggccggtgattccgtttgggcttttgaaacgatataagcccctttttccacgcccgcatacgcttcttcagcctgctgatcaatcgtcggcaggttttggcgtgtcaatacaagagctgtcggatgatcttggctttgaacggcaaccttccatgcagctgcggtttcatttccgtcagcaggtctgatcacagaaaggttaggaagtgcgcgtaaagaagcaagctgctcaatcggttcgtgagtcggcccgtcctctcctacggcaatactgtcatgcgtgaatacataagtgacgggaagacccatcaatgacgccagacgaatggcaggtcttaaataatcagagaacacaaagaatgtgccgccgaatacgcggaggccgccgtgaagcgccattccgtttaatgcagcgcccatcgcaaattcacggacaccgaaccagaagtttttcccggcgtagtctttggccgtgaagtctcctccatttttgattgtcgttttatttgaacccgcaaggtcagcagatccccccacaaagaaaggaattttcttggcgatcccgttcagcacctcacctgaagatgcgcgggaagcaaggctgctgcctttttcataaacgggaacttcctgatcccagtctttaggaagctcgcctttcattccgagtgacagctgttcagcaagctcaggatatttttctttataagccgcgaacagctcattccattcctgttcttttttcgagcctgcttcttttacagcttgattgaaatgcccgtatacttcttccggaacataaaaatcttcttcaaacgtccaagcatacgcttcttttgtcagcttgctctcttcttgtcctaacggagcgccgtgaacgccggatgtgcccgcgcggtttggagaaccgaaaccgatggtggttttcacttcgatcaatgtcggttttttatcattctggcgcgctttttcaattgcagccgtcaattcagcgatgttgtttccatcctcaacataaagaacttcccagttcattgcttcaaaacgctgctttacattttcagagaaagaacggtctaaatcgccgtctaaagaaatgtcattagaatcgtataatacgatcaggcggcctaattcaagatggcctgcaagagaagctgcttcggaagaaatgccttccattaaatcgccgtctccgcaaatactgtatgtataatgatcaactacgttgaatgaatcacggttatatgtctcagccagatggcgttctgcaattgccattcccactgccattgcaataccctgtccaagcggcccggtagttgcgtctactccggctgtatgcccgaactccggatgtcccggtgttttgcttccccattgacggaactgtttcaagtcttcaatgctgaggtcatatccgcttaaatgcagcatgctgtataaaagcattgaaccgtggcctgctgataaaacaaagcggtcgcggttaaaccagcccggattctgcgggtttacattcataaatttcgtccacagcgtgtatgccatcggagcggctcccatcggcatgcccggatgtccggaattcgctttttcaattgcgtctatagatagtgtacgaatggtggcaactgatttcttttcaattgtatccattataatccccttccttattgttgtaccttttcatcataaagcgatgctgactttttctcaactctttcagcttaaatttgagataaacttgttgaaaattgtcgtaaagcacatcctgatattagtatatacgaaaaaagaatacgtattgccgtattctttctgtttaatgaagattatttttctgttgttctctttttaatttttcaggggtgacatcgttgccttccggatcaatcacttttacgctctttaacgtatttttcattgaggagcggaatcctttcaaatactcctggcgaagcttttgctgttcagctttttcctcatccgttatcgtgtttgatttagctttttgagccaattcgttaattcttgcgattttttctttagaaatcataataagctcctttggtgcgtgttgattatatactactaaaacgcagtcttttttacaactgatgcgcgtcagctgccttctgtgtctgcgatatattcctgaaaccgccggtgaaccgtggctttggacacatcgtagccgaatccccttaaggtcgctgcgatttctgcaaaggtaagcttgttggctctcagcctgataatttccgaaaccggaacctcttttttttcttttccgctgttttcatgtctgtttttcagattccgttcaggtttgtagccgtttttcacggctcttttcattccccgccggattttcatattgtgaattttcctttgatattcctcaacaatactgacgatttcgagtaccatcgaatcagcttcggaaagctccagttcacctttatgagccgtcgtatatatttttacgttctccctgtaaatgcaatgcaaaagcgcaatcttggcgtttcctcttcccaatctcgtttcgtcctgcaccaatatcgcgtcaatatgtgattttttaatttcatcaagcatttcaaatactccgtcgcggtccatttcgtaaccgctggctttctcagaaatgactttcacgacttccatgccgtttgcagcagcaatctcactgagctcctcttcctgtctttttaatgacgtttgctgctgttctttgtttgtgcttacgcgggcataaatgagcgccttcatttctctctttcctctctaattgacaatggccagctgatatacggccggatgctttttcttaaccggaagaataagttcgtctccgggctttatatcagcagtttggagatgattattctccgtcacccactcaatgaaatcttctttattaatgtgtttcttttctgctacatgatccgcaagtgaccagagtgtatcgccgtcctgaacctttattttaacatattggctgagggactgatcatttcccgcacatgagacaagtaaaatagcggcacttaaaatcgcagtaaacagtccgacaaatataatagattctttcgccatgtaaacaacctccgataagaatgtttgttcgctttttataccttttagtatatacgaacaaacgtttctgtcaatcgtttttttcgaacctatgtttgtactgtcaggaaaatcatgctataatctacttaaaatcgacgttttgaggtgcgaaatatgacgaagctatcaaaaaggcagcttgatatcctgcgttttattaaagaagaggtaaaaacgaaaggatatccgccttctgtaagagagataggagaagcagtaggactggcttccagttcaaccgtgcacggccatttggcgcggctggagacaaaaggcctgatcagacgggacccaactaaaccgagggcgattgaggtattggatgaagaagaagtccacattccgaaaagccaggtcgtaaacgttccggtcatcgggaaagtgacggcgggtattccgattacggctgttgaaaatatcgacgagtattttccgcttcctgaccggatggttcctccgggcgaacatgtctttatgttagaaatcatgggagaaagtatgatcgacgccggcatttttgacaaagattacgtcattgtcaaacagcagaacacggccaataacggagaaatcgtcgtagctatgaccgaagatgatgaagcgacggtcaagcgcttctataaagaagacaattatgtgcggctgcagccggaaaatccgacgatggagccgattatcctgcaaaacgtaagcattttggggaaagttatcggcgtattcagagccgtacattaattctattaaacttcatttatcgtaaaaaaccccttacagaggggtttttttgcataaaaaaagcagattcgccctggcttaagaaacgaatctgctaaggaggaaaaacttacattcttattatccgacatcacacttttgaagtcaactaataatgtttccctcgagaaacttttcattcatttttcaactttgtatatttgtgcgtgatgaatttacttttgtttatgttttctttgggcgggtgcattaaaatttatatatgaatatttagtacatagtacaataatttatatttaaatataaaaaaacccgctgcctttagcgagtatctattttcaatcaaaatgataatattctacaccgtaaaaccctttaatatagacggggccacagacgtttgaagaactttcaaccagaattctgtatttgtgatacggatcaattgattttttatcctgggcactgaggtttaaccagctgccgctgtagtttttagaacttaatgtataaaaattcccgttcagcgccatccgctggagtttcatgcttaaaccgcacgaagagttgttcattatggtgaacttatatcctaaaaagtaatcgtcggcagctacagcccccggattttcaatatgaaactcttttgcatttccctccaaagtgaagcttgtttttgatccgaattcagtggtagccgctttagctgagtgtattccgctaaaacataataaaaaaacagcaatacatatccagtattttttcatttgcatccccctttttacatattttaacttgtgaatcctgtgatgtctattcacattttattaaaacgtatgctttataaccactatataccagtttaaaaatttgcggattgcttacaatgaagactaaacgaaataacgaaggtggttcaaatgaaacacgtaattgctttcgcttctaaaacggcgctcacacttgctttactgtacattgttctggatcttatgtaccaagtaacctttttaaacgttctgtttattacagtgatcttaagtttaatcacttattttgcgggtgattgcatgattctgccgagaacaagcaatttcacagccgttgcagctgatttcgggatttcattcattatattatggatattccttatgaacattggcggatttaatgtctctcctgccgcggcatcggttatctctgcactttgcatttctgtttttgaggcattttttcaccggtatttgcagcaatatgtacttcccgaagattatcaggacacaacagagacggatagcacgctatggagctatcaaaccgaggcgtctgaagaattagtgccggaaaaagaccctcaggaaaaaacataaaaaggaggcaatcgcctccttctcattttatttttgcttctgatcgtccagcggcagctgcagcagtgagtctgtgcctgtcgctttcggcgtttttccgtcccatttttcaatccatttatatttgatcatctcatcggacattgatttctttatgatttcgttataatcagcgatcccttccgcttcaatttttttctttttcgcttcggcttcggctattttaatttcagtttgtgtccgttcaagttcctgtgaagacttcacccttgcatcgatagcttcctgtgtggctttatccggcttcggtacgccaagcgtcagatcatcaattaaaaatccaagactcttcatatcatcagcaaatctcttttgaacatcggcagcggcttctgcagatttttgcccgtatgtgtcaataaccgagtatttgctgattgattttcgcgccgcatcccacagccttgtttttaaatatgtattttcaatcgtttcaacgtctaccgctccgaatttgttaaacagatcgactactttatcaggctgcacgacatagttgtaagcgatatccatttctatatttttaccgtctgaggttgccacttttatattttcattattcactgtctgcatacgcaccggatattccgttactttattaaataatccgactaagtgccagccttggtccaatgtgtcggattttaccccgccattcggtgagtatacaaccccgacataaccgttcggtattttttcaatgaatagtgacgctgtaacgcccgcaattaaaagggctgcacctataatcacaccgccgataattttttttttgtttccgcgcttattttcgctcatgctgatcttcttcctcccatgactttttgaattttttggctccgcttcccacttgtttaaagattggactaagcatcagccataaaccgaatccgatgatgacaagaagaatgatagacccgatcatcactttcatttgcccacctcttttctttcatcctgtcaattatgtatacgatcttaagaacttaaagtttcataaatttcaaaagaaaaagccccgccgacaaaataggcgtgcttattaatatttgtcactgataaaatcagaaatcgtttttgtgaattggtaaaaggtcccgttttgtgtggatgctctgcttttcagcgtaaaagtgtcaaatagtgattttctgaagccggtgctcatttcgatttgaatactcaatccggatgaagattgattggcaaggttgttcggactgacgcctgcatatttatcatttatgccaagaagaacggcaggatacccgtgccgtttcagcacatcggtcaaaagttcggcccgttctctgtctgtaccgccgatttttatctttttatcgtcactgccgtaaccgtgcaatgaaatgacatgagagtgctctttcaccatttgcacggccttaggttcatcgaaatgcgaacttgtcaaatgcagagccgcattaccggctggttttaacccttcaaataaatataaactccggttttcggcaatttctctggctaactcactggtccccggctctatgcctccgccgtgtatagctaatatgaggacagaagggtcatgctctcgcgttgaaatggaaaaatcggaaggatcttcattcagctttaattcctcgaaactgccgtaaatatctgaagcggcatcagcccgaaagaacggcagaagcaaaaacggtaaaattaaaactaaaattccttttttggttattgatggcatttgtatgtttatgttacaatacaaatgcttcagcctttgaagcgaacggcagaacagggtgactttggacggtttcttctgctctgcctctttgccagctgctttacggtctattcttctaaccctttttgccataacatcatcctttcttttgtttacacttttgtcacaatattatatacgttggacaaaacctccgttcatcttgaagaataaaaacatcaaaacaacttctatcctttaacctaaaaaagtctttctgttcaaagagacggaaggcttaaatgataaaaatgaaacccttctccagttttggaggagagtgaggactgcagggaaatcattttatcaatatgctgagctgggctggcgtccgggtcaaatatttgctccggcatagacggttacggagcggccggttatttcgaagtcaaattcgaacgtgacgtatgatttcccaattcaagaatccccgaaacaaattgaatgtaactgctgtttccataaaaaaaaagactgctgttaagcagtcttttttcgttttatttcgtacctgttgatcccagtccgccgcggtcattgttcccgagcttgtctacttcgatcagctccacttcaggcattttcttcatgattctgaattggcagatccgctcccccttggaaatgtcggtatcccgaagcgcgaatgcaggaaaaaaccagaagtcattgtcgcctttataagattcatcaatgactcccattgaatttgtctgaatgatagcgaaatgcttatatgtacttgaacgcggaacgacatgggcctcatatccttccggcagttccatcgcaactccaagcgggataagtttgaattcaccttttttgattgttatatcttcagctgcccgcaaatcaatccaatcgccctgttcaattttactgattctcgtttgcgtatcatctgaatatttaattttgatttgtaaagtcattttcgctgctccttttgcttccctatttcagtcgtattgatgaccaatccgtgccccattataccatttaactgataaaaatgttgattttggtgtatatgcagccgaagaggaagcactgcgaagccaatgagaataaacctaaaatgagggcccctcctatcagtttttcctccattttcacatgacagcttcaattacaataatacaaagctttatatccgttctttcaacagagcttttttaaaatttcaccttggtttcaaaaggaatttcgttctgaataaagaatttgaagaataagcgcttaaagggcgcacgactcttttctgtcccctgcctcaggcgcttatatcaaaagaaagaggtgtctttagaatggttcaatttaaaaactttcctgatccgtctttaaacgccccattgcagtctcgccctgcacagccctctgaattggagcatctcaaagcaaggatgcagaattttattaagcattccgcaacggatgataatcttgagatcgcagatgcccgggtgacggcggaaggaatggtcacctcacttttaaaagaacggcttgataccgaatacgaaatgcttatgaataaaatcacccgggaagtgaatgtggaggactacggagcggtccctgacggccgggacaatacggaagcttttcggagagcgatcgggaacggccgggtcaaagtaaatgttcccgcaggagaatttttggttcaagggataaaactcccctcatggactaccatttccggtgagggacaagggattaccgtgcttaagcttcatgaggacactcccgcattcgaatgggtcattactaacgatgattacgaaaatggaaaccgtaatatttttgtggaaaacatgactttagactggaatcctgatcgtcaatgcggggtcaggaaccccggaggacagttttccagctgtttaacgtttgctaatgtgcaatacggctggattaagaatgttgaaacggttaacgcgggtctccatggtattgatattacatctccgacttacgatcatttgcctgaaacagaatggacgaaagacggctgccgatatatatggattgataactgtgtggcatacggcgccggagacgacggcattaccacccattacagcgagtatattttcatttccaactgccattccggaaacccccgcggcacagagcatgctgagggcagcgcaaactcgaacggcattgaaattgacgacggctctaaacatgtatggcttttaaataactatacgagcggaaatatccgcgggattgaggtaaaggcgcacagcctgtggccggcttctcaaaatgttcatattatcggtcatgtttcgtatcgtgatgtacgttcatttgatattcgtcatatcggccatcatcaggcctcagaccccgaaagcacgacggcttatgatgttactttaaccgattgcaccgcgattgaaccggtgttcaatgctctctatgacggtgtgaccccgagggcgctggtcatctctgcttataaaaacgttaatgtaaacggattcacagctattggtgatccctcatacgactatggcgggaatccagtcgtggctcttcaataccgcagtcaaaatattacgatcaacggcattaaaatacgcggctttacacaagccggtgttgacatcaatatatccggcggatcaaataaaaccgattatgttaaaattttaaattttgatatatacaagtcatctcctaaaggcatctcaatcggcggaggccaatataacgtaaatattatgaacggtacgatgatcggagatggcggttccgtcggaattacgtcccctaacagtcaggccgtcattctcggggtgcaagcggaaggttacagcgcggccgcatctataaaaggacagacttatgagcagatccccgtcaatttaaagggaggcgcacagctcgcgaccagctccggttttgcattcaacccgacaagcgccgttattgcgggaacaggcgatattacggccagaggtgacagaaatgcgatcatcagctcttccggaggttcaagttctgaaggttcaagggcatttatcgccgcttcaaacaatgtccatattacgggcagcaaagtctccagaacgattctgtcatcagaaagcattacattggaagaaccatacacggttgccggagggcatcagtccatcaaatggaaacttgattcagcgggcggtcacggtacgttcgccggagctgtcacctcttccctgtcagggtacggagaatattttgaaagtgtaaccggccagacaattcccgccgggacgatcgtcacagtgaaaggcgaaaaaattgaatcggctcacgtcggagattacatgctcggcgtcatttcagaaacagccgcttttatctcaggagccgcaagcttcggatggcaaagccgctttttgacaaacgagttcggcggtttcatttacgaaaatgtgactgacgaggaaacaggagaaacggtacgcgtgccgaaacaaaacccagactgcagtccggctcttgaagctgactatgaagcacgcgcggccagagacgaatggcacattgtcggactcaacggccggcattacgtacgggtcgacggtacggtcagcccgggagattatatcacggctcataacggaatcgggactaaagccgcggaaggctggaaggtattgaaactgacggccttatacagttctgaaaaagggtacggcattgcaattgcggttatcaaatagggtctcaatatcaggatcatctcttctctattctatcgggcgggtatgatcctgttttttataccgaatgagatgcctctttttcagcataccgtttcatttgtccaagccatccatgctttctgtcatagaatactaccgtcagatgaaaaaaggaggaatatgagtatggatatgggtatggatatgggtatgggtatggatatggacatggatatgaacggacattatgatcaccacccaaagcagcctaaacaaaaaaagaagaaacaagataaaaagcatcttgattatgattacatcgttgtttataaaagaaaatgtaaaaaatgtaaaaaatgctactaacttgacatatcaacactttttacacccggtaaactccgggtgttttttctattatggcgtttctccgggctattttcacccaaaatccggtcatcctatcacaatacataaaaagactctattattttcttcccttttcgcctaatgaaaagtatttcatttacagaaaacaacacaaatggaatgacattacttttgagaaaatctactctttgcttggtcaatttttctgcgataccatgaatttgcaacaatttttaaaaatttcctcaggaggtcatagccattaaaaaatcgccagaacgatagtcggatcatgcttagctttatctctaacaattcctttcacagccagtgcctcagcagccagtcagtctaaacacgcaaacgcgcctcacgtttcacccgttgcaaatccgttagaaagtaaattatccaaaacagcagaccaaaacgtaaaagcagcaggtgttgatgccgggctgaacgtaaacgtagatgttctcggaatctcagatcgcattgctgaagcggttaagtaagatcaaaaccgaaccggctgggtaaaaaatgtcatggaaacaacattttacgcatcaggacagaagtacaacgtcatggtgttcaatttaaatcaagaatatgaagaccgctttaacggcgttcagttttacggatcagccgtttatgacggtattacttacggaatctgggtcttcgaagacgggtccttcgataacaaaggagacgggggctggatcaattgggcattcagagggtggttcgatcgtgataatcagcgtattgaattccacagaccttaatacggagaaaacttgcggcagcgcccgcaagttttttttaactggactgcacatttttcaccgttataacgactatacttgaaatgcgggctccgatcgcagccccggtaaagtctttcaaagtgagggtataccatgtcaaagtctttaaaaatagtgttgtggagcatattggtgttcatcatcttgttagtgattatcggaatcgtttcttacaatcaaactccgtctgcagaaagcacagcaaaaagaatgctttacagcgtctaatcaatgttaaatcttcatcggctttttttatttaccgcagaacacttgaagttcttctatttagatcgttaacgttcccattcggaatggagtatacgcgtgtatcatcaggcaatccgttttgatacatggttccgattatgcccttcgcatcttttttctcgattccccatcacattcccttttttcataatactgctcttgaaaccaaccaatcatttcttcagcctgttccgttgaatcaaaaggttccaatcctaatagcgtgttgcattttcatttttaaaaaaacaagccaactgcgcatcctcttcgcaacttctcaatgtatgagcctactcgtttctattacaggaagcagtacgatgcctccttttactcattttaacggatggtcatgtaaaggaaatatagactaaaaaaactttttttcaaaaagtaaactagcatccctatcaaacttttcatttcggcataatatgtattaatcctctttaggaggtgagattatatgggattctcaggtggttatggtagctcctttgcgttaatcgtggtgctattcattttattaatcatcgttggggcttctttcctcggcggttattaagaatcctcttacctccgcatccatgtcagcagcacctccatgatcgtacggcgccataaatgaaatgtttatggcgctctgctgtttttccccttttcattcacacattaaaactaaaaagatcggccgatgtatcaacatgcagccgatcagtaattcatatattattgtgtaaggtttacatcgatgacgttatagaaggcattggaagtatccgcaacgtcccatacccctaaaatgacatgatacccgcttcgatcagtcggcacaaaaatcttatgagtcagattcgtatctgccttggaaccgtcgtggtttaccgttccgattaattcgaattcatctcttgacaaaggtttattcggattccagtttttcttggtgatataatagtgccactttgatgtcgcatgaggggccgtgtagtaccaagtaaaggtgttaaaaccgccgcggatgttttgttttacccaataatctgcagtctgcttgtctaaaccgaagtcaatttgtcccgatcccccatttgcagacgcgattcttccatccggcggacctgcagccggaaatcctttcggcccttctacagactgaggattatcaatgacggagccatatttctgcgcagcggccgtccagcccaatgtttgtttctctaatgctcccatgtacgctctgctgacgggctcttttatatacccgtgtgcagatgcatcacttgaatagaaagcgcctccaataccaagagtaacagttaaaactgcagcttttactaaacctttcattactgcatcatcctccctcttttgttaataaaaacccttcagtgtatacacttcacgatggaggatgaaatgaccttccttttcttgataggaaaaagcaatgaggttggcgcttttccctttgttttttataatcataaagaaaaagccgggccgattctgttatcgaatccgcgattgaccggcccgccccttttgcgcagaacttcattcgctggatttgccggtttcctttcggataaccggtgctacttccgctgctaatcgttcgatgttttccgcggcttttttaaacggcatacctcctatatcgatttgcgcgagaaatcgctgatgtccgaataactcgtattgatgcatgattttttcaatgatctgctgtgagcttcccacaaataaagctgtttcttttccggacgcccgcgcaaaatcttccttcgttaaaggctcatcgatcccgtgatatgaatgaacgtgagaccagtaatttgaatgatacggataaaattcttgtattgcctgttcattcgtttttgaaatgaacatatgtccggttacggcaaccttcacattttccggaggatgaccggctttagaagccgcttcccggtatttgtcaacaagcggcttagatgacatcggatcaccgctcagtacagctaatgccaaccccgcacctgcacgcccggcccgttctgcgctttccggagtccccgaaacacctaaccatagcggaatgcttccgcgaaaaggccgaggagaaatttctgcctcgcgcagcggcggccggtaacgtcctttccaggtaaccgattcttccccggaatttaattttaaaaaaaggtcaatgtgttcttcaaacagttctttataatggcctacgtcataaccgaaaagaggaaacgagtctaaaaatgcgccccgtcccgcaatgatttccgcccggccgtctgaaatcagatcaagcgttgcaaaatcctcaaataaacggacgggatctgcggtggataatacagtcgtggcactggtcagcttaatattttcagtgatctgtgaaatcgctgataagatggccggcggcgaagataccgcataatcaagacgatgatgctcgcctacaccgaatacatcaagccctgcgtcgtcagccagtttcgccagcttcatcaattcatctatccgctgctttgcgctgactgttttccctgtcagaggatcgggatataattctgcaaatgaataaattccaatttccatacaatcacggtgttcagccctcacatttctctcctcctgcactgagtaaaaaagcttttatgttattctattcagccgttttacaaataggaattcgttcaaaataaatacagaaggtggtatgagagaaaaaaagtttctggcgtccttcaattctgcccattatactcatgcagccggactaggcaagaacaaagccggcacaagcggattcgaattcatgtgttcattttcagtccaattcaatccaatcgtgatattgatcataaagctttcgtattcttccggcatcaagagcaatgacttcacaccctctgtcatcatacagaaagaaaataatatcttttgtcatattcacaaagaaaacatcgggatacccaacggaacagcccccgaaccttggcttcagcggaaaatcttcgtggacggctgccttaagtaattgggggatacgcagatctttccgtttacataataaagaaaactgctgcatttcatattcttcttcgaccgggcatggacaggtcttcacttgaatccgatataaatcatccttacacttcagaaacggctgataaacctttaattttctcgcgtgattaccttgagttttgtgcttatacacgttggcaacaaggaacatgtcatcgctatgttcaaacatctcattgaaaaatgcggcggtttgatgatgaacaagctgaaaatactcaagattcaaagcaccgctttcattaaattgatacatattgccgccgagagaattcccacgtcccattgatgataaacgccggacactaattttaaagtcggaagcctttccttcagataatcatttattttcattcaaacatctcactttccttttcccgctccagaggcagaagaagccgaaaacattccgcttatttctttttcacccttgtaatattattcagattggaatacaatgaaatggaacactgtgaaccccattgatcagggtggatgctggtcacattcatcctgatcctttcttttacacaagatcgccccaactttgaacccctccgtttccaaccctattcattgatattacatatatttcaatggtattattttcttatacataagcatcaagaggtgtccgctttgaacaacatcagaagattgagagaatatttccggtctcaccgtaaaataggtctggctgcagacttgcttacggctgtattgcttatctcattatccattcttttttacggatgccggcagggagctgtcaatggtttctttatgtatgtcttagtaagtaattttatcggctccaatgcctcttttatcgacttcagcacatcgaggaaaaacagtcaaaaataaaggctctggtcaaaaagagggttataccgccctctttttattctttcagtcataccaatgcgttcttttcaggttgaatttttctgaataggactcatgatcggttttccatgctgcttcaacagtgatttcatgaccgattacttcatgttccggcatatattcaaacgtttgaatatggtcttctcccgttccgccgccttctaatttctctccggtgtattctgaaagatgatagtctttatcttcaccatatttccggccgtcaacaaataatgttaatctcttaatcaccgtgttcttttcattcactttattacctctgtaatacaaattcaagaaatagttagggccgatagaggtcttgcctgatttttcgattgacgcttcccacgtcttgctttggctatagccgatatatttaactttttctcctgaaattaaagaaaacagtgcaaatccggctgctattatgagaacagtgataataaccagcaattttttaatgactttacgttttttcatgacatcccgcctttatcatttagaacgtatgaatattagaattgttacatttaatttgaaagaataataaaaagggattctaattccaggaataaaaaaatactaagaagatcatattccccttagcttcacatcccagactgccatgcaataatgataaaagtcgtccaaaaagttgtgactaaaataagcataacggttacaatcattaaaatgagacaacttattgttagaattgagtctttgtttttgttaagaatcagagtaaccattgatcctgcagcaaatagatacgacaaaaccgcaccgacccaataccacagcatagagtcattgctccagtaagccattgactgcatataaatactgaatataaatcctgacaatgctaatagaaacgaaactaaatttgatttcaagttagagttcctttcttcataagttttatttttaggaacggtcatacatctgataacaccttttatgcgatatgcttcgccgctttgtctgcatattttaattcttatttcgtttttaaataagtttacgaaaaaagaaatcatataaagttcacctgaaacgccgatttaaaattaaatagatgttttataagcgttaattgcttgatttctcaaaagcatatttatcattcgcaaccattccaagattgtatgcttgtttgatgatatccagcacttgattatcagtttcagttacaactcgtccaccagttattctggatttccaataatcaaactggtgatttcattctgaacagcttttaacattttgagtatcaaccacttttccattctcgagcgcatcattgctgattcgattacttcccgctccttctgtcgttaaactgcaaaatgtccatcacattcatcctctctccaattttacaacgttgctataatgaatttcatgattttcccaaccttcaagcttaatctttttgatcgttactaatctaagtacttttttcaattccataatccattggtatgatcggtaacctaatgaagtatttaacttaaatacaaaaaaacctgctttttcagcaaggttttttcgacaaaggggagattatttccccacaaattctattaactatgtttttgttttaaccattctttctttagcaatgcgtattggtaagtgttttcatatttaggtgttccatcctcgtgtgcagtaaatgaaataaattcaagaaaataaccttctttacgcattcctaatctttcacataatttttgtgacctgcagttatcatcttcaacatatgcataaagccttcttgcttttttttgcataaagagatactcaaagaaagccttcgcactttcacttgcgtatcccttcccttcaaaacgggcattgaaattccaacaaacagaataggtatctggctcttcttttaaataaaatagttctccgactagatcattactgtcttttaaacaaactgcaatataagagtcatctcggcttcttttttgaacgtttacggcagcttcttctaacgtagacattctgtcatcaagaaagcaattcactctcggatgtgcagaatattccaacagaccttacgcatctctctcggtaaaatttcttaaaattaagcgaagggtttcaattttttgcatttgcagtctcctgtttcattgttatcgatctttgaaaagaacttcttcaacagatcttattcgtttgttgaagaacttatctcaatctatttttactataatgatggacgttatcatctttgtcaaaaacaataatcattcatttggcgcccgcatgtaaagtactgaacaattttcgtgaaaaaccctcagtatcgaatatagaaacgagcaatagtaattaaaacaaagttaagccattaaaagcttattgagtattttttcaaacttattcacgctcatcatctcatgagtgagaaatgtcccattataaaacacgctgaaagtcgtccaaactgccggggatttttgcgccatatcttttgacgttattcgccgggcctgaaaatgaagtcctttcttttcagtcagttcctttaaatcctttaacaatccgactgcaaatgggcattgggctgtataaaataccctcattattaacggaattacttttcacctgttttttaaatacaggaggatatgcatgtttattccacgtcagtgacatcaactgaaaatagggttctgcttcatcttgcacagcaaatcccatatgttcaaagaaatgcttatcacttaaataagggagttttttcttccccactatatgaactatcccatccataccgcgggattttgcatctgacacacatttttctaacaagtgtttcgcatgtccgttattcttatatttacctgagacccaaagacaattaataaacataaaatgaggtgcgcttaccggaacccacgcttcttctgcaggtaaatattcaataaaaacttttgcccgttcgtttaggcgatagaacaccaagccatcaatcatccgatctttgagccagctcttcttttcatttaccgcatcctcatattgtttcgcacctaatgcacagcaaatatgattgtcattaatattgtccctagtcaactcaatgtattccatttttcctcacccgctttcttttggaaacatcagctttacttgcagtgaacattgtaatttctcagaaatatagagtcccagaatcaatatatgaacgcagcaacaatgctcattatgtaataaatgaaacttctgaaaactgtgaaatcaattgacggattatctatgtgccagaacaagaacacggctaaaaaagcgactgctgtataaatgaaaagatgaaccaaactaaactttttaggcttctttcttagccatagttgcacaggaacagcaaacaaaaagtaagtaataaatgcataaaaagcaatgataactacagtaaccaatgcaaatggcacaaaacccgagtatacaaacatatatagcccgaagatcaaaccatacgacaaacttgaaaaagccaatgtgtaagtatagctttgacttttgctccaagacgctgcttccatatagttcacctgctttttataaaaatacatttctcatttttttcctattgtttaaaatcagtatatatccatcactttaaaagatctatgtttttttggcagatcatcaattcactatcttaatatccaaattttaattgccattaaaaaaggtcaaggaaataccttgactgtgtatcgctcaccaatctgcatccggctcatcatgttcgaatccgtaaaagcctttaatccacacatctccgcagccggctccttttgtgatcaataagtaatgatttctgtttgcatcaccattcaccttatcagccgcgctcaagttcaaatgattatccgtgaaattctttttactaagggtaaaatcatatcctgccagtgtaattctctgcagtgcaagtcaaatatcgacagaaagattacgaccacaaattcaaagcattctgtgcatttggagactaccccccccatttaaacaccattcggatgacaaatgcatagctccctcaacttttgtagagacacttgtccgcaaaaaaatgtaagggttttcaaaaggagagcagtgtgctaaattgtaagataagtaaaaattttctgccaatattcgaaaggggtgcatgatttgaaagcagtagtagcaacaaaagacaaaagtatagcgatcgtacaaaaagaattacgtcctttacgacatggtgaagccaaagttaaaatggaatactgtggtgtatgtcatactgacttgcatgttaaaaatgctgatttcggggatgttactggcgtcactctaggtcatgagggaataggcattgtaactgagatcggtgaaggtgtaacaagtttgaaaaagggcgaccgcgtctctattgcctggatgtttgaaagctgcggctgctgtgaatattgcctaactggccgtgaaaccttgtgccgcgatgtaaaaaatgccggctatacagttgacggcgcaatggctgaagaagcaatcgtagcggttgattatgcaataaaggtgccggaaaatttagatcctgcagcagcaagcagcattacttgtgcaggtgtaacaacttataaagccgttaaagtcagtgaaattaagccaggtcaatggatcggtgtatttggagtcggcggtttaggcaacttggctgttcaatatgcaaaaaatgtctttaacgctaaagtgattgcgttcgacattagcgacgaaaaattgaattttgctaagagcttaggcgctgacgcggttgtaaacagtttaaacgaagaccccgtcgctaaagcaaaagaagtgactaacgatttagggcttgatgctgtggtcatcacggctgtctctaaaacccctttcaatcaagcgattgatgttgtaaaagcaggagctcgcgtagtcgctgtcggtttaccggtggacaaaatggatttagatattccccgtctcgtgttagatggaattcaggttgtaggttcattagtaggtaccagagaagacctgaaggaagcttttcaatttgctgcagacggtaaagttgtacctaaagtgacaaaacgcccgattgaagatgtgaatgatatttttgaagaaatggagcaaggtaaagtgaccggccgcatggttatcgattttacttcctaatcattaaggctgccgggaatgatacggcagcctttgatctcgattcttgctcggcgccccacccagactgaatgagactttgtcatttagttcagaaaagaagctctacagatcattcggcggttatgcattttgcaagtactctctgaactaatcctgataccaatataatgcaaggtcattcattgccgaagcgtagccctgctgtcttaacatagttgttatgctgccctgatgataagttccgtgattggcaacatggaataaaatttctgagtaagcagtttctctgtaacctaaccaagggttatttaagttcattttttgttctacatcggtttggctattcatccattcttcaaactgtgaagccagttcttcataagacgccgcaaattcatctgatattcaataaaacggctgttgaacctttgctatgtatacagcttcatcttcacaggcccaatttaatctgcataatagttcactgaatctttcaacaattttagataaacatcttctttttatagagatgttcgttcaatcgacatccttgtgatatatatggtaaaatttatagaaacaaaggagtgttgttacatatgagtcttatcattttagcatccatgcttttatggggtgcagtgatccacgagctaaacaaaccttcaaaaaagcaaagtaaacgaaaaatgatccctttggtatccctcagttctttatctactttaatcatcacaatttcgcttttttctaatttaattggttgatatttgttatgaggaaacccgccagaggttcctcataacactaaaaacctactcactgcactttttacagcagaccttatcagagtgtttgcttaacactttatccattctccccacaggcatcttcttctcactcggaagtgtaagataagctgttatctcatcccctgattttattgtttttccgcagatagagcattttaactcagtattaaagaaattttttaatcccattcagaagcctccttacttacctttataaagtaatacgttaatgctttataaaagtttcaggttaaagaaatattccttgcccgggaatatacttcgtttcagttgatccgcagccgtcccggtcatcgttatacctcactcaatcaggcaacttcttccttatatcctctacgacattaaatgcggggaaaacgttcattcaagaattcagcgttaaccaaaaaggagaatacatcctgaaatatgatagcggcaccggtgatagtgtcaatggtttctttagatctgttgagatctaaattccgttaggaaagtcggcagttttgccgactttcttttccaagcattctgcaggaataaaggtgaagtgtcgaataaacatatgacctttttgaaacggaaactttatcggcatcacaaacccgcaagcagcctccttgtatcgtaccttccgtccctttgtgatttgttttgatttgtcgtatactgcgcttgcccgggaaatgatgaatattttcgttaactataatttccctgtacctcttcgtatgtggctctgcatgatgaagtaacttcatggctcaccactttcatacacagttttattgcatgtttagccatatccctcctctttaaacagcaaaccgtcccatccatttctctctttcagttaacctcccattattttattgttttagaagctcttcattttagacataacattcattttttcttatttagacttaaatctatgtcgaattttatcgtccggcatattatgtactatcctaacaacaggaggtggcaataatatggggaactacggtggaaattatggcggaagctctttcgtattgatcgttgtgctgttcattttgttaatcattgtaggtgctgcattccttttctagcacattgacgatttatattcgtctcccaaacattgcatcccttagttcggacagacgccataagaagttttatggcgtttttactttttaaaaaaaccaatctgagataaacattttttatttttactctggtaagcgggagagtttcctcccctgcctgcgccaatattgccgctatgaagaatgaggcgaacaatccaaaaggtgttgtgatccattctttaaaaacgattccgaaaatcaacaattcgcaagcagttccatataaaatagctaaacctgtgattgcccattggcttatattcttatcgcctaaacaacctgatacatatccagtccaaccactcatcatgtttgatgatgggcccgttgtatcttctgcagacttttctctttcaaagacaccagacttatcttcatctttaacgccattaacccaataggtcattttgttttgaataaagacttgttcatgaacatagctcctaaataattgttactaaggcgtttttaattcatcggattacagatgttgtgaacttaaaaaggatattactcaccttcataaaaagatttagtcactgaagggctcacccacaaaatgcggtgttcacacattgagtcattttcacataaaaaaaccggattcctcctttaagaggttccggtcttttttagttaaaatgcgggaaatatctggtgacgtgctgcacacccccgctattataatatttcaatagagccttctgttccatgaacgcgtattcgctgcccatcttttatcaattgggttgcattttcaactccgacaactgcaggtaagccgtattcacgcgcgataaccgctccgtgggtcatcagtccgccaacttcagtgaccaggccttttatggatacaaacaatggtgtccagctgggatcagtataggaggtaactaatatatccccatcttccaaatcggcatcttccatgtttaaaataacccgtgcccgcccctctatgactcccgaggaaacgggcagccctgcaatcgctccggccgggagattttctcgtttgtactcgcctgtaacgatttcaccgtcagatgtgataacacgcggcggagatagtttttcatatacttggtactcgccttttcgtgtgctgatgatttggtaatccaatttatgtgtgcgtacgacttcctgaagttcttcaaaagtgagatagtatatgtcctctttttcatgaataacgcccgcttttgcgagttgttcggcttctttcagtaaagcctgcttataaacgaagtagcggctgatcatgccgtattttggatattctctgaacccgctgaagttccggatgatgcggatcattcgtttggtttctttggctttttgttcaccatccggtaattgcttcaatcggtctaataactcttgttctttcttcaacgcctcccgccgcccttgctcaaatttccgctggctggcatttggctcaaagtttttgagattattaagaatcatagggacaagtgcagttggtttttcgctccatcgagttcttgtcatatcaatttctccggcacatcgcattccgtacttgttgagataagcatagatagcgtcacgggtttcccgcccgccttcaaacgtcaccagcccatccaaaaagtgatcatcttttacattctctaaataggcaattacttctggataagggcggatcacatcggcgacgtccaatagcgcaagccccatttctgaagtaatattatggggtacagattgagaaagcgtatctgctgcgtttttttcacctaaccactcgttcattttttcgttaatccatgatgaagcatccattgcagttcgaatcaacaccgaactttttgggttaaatagaatcttctttaattccttgatatcttccaaaataaaacgaaataaatcagatcctgatttcgtctggatgttttgttttaactcttctatcgatgcttgactgctcttaatcaaatcagaaacaattgccggatcgttttcagcttgttccggcatatctgcattgcctttgccgggaatcggcgccgttttatcaggtatcggcttaatgaaatcatctcgctctattatggtcataagtgcgtcttttaagagcggatcgtgctgccccatgccttttaagaaaacttctctgacattaggggatgccagttgatgtgtgacatcaacgaatagccttccgccggctttacgcatgggtgcagcagtcgtcaacagaaaaaaagacaatccaaggggttttatgggatccgtcatcatttgctgatgaccaacagagatatagacgtgattttcttgatcgttcgcttcaggaacgggatataacgttgtgatcggacggctttggacaatataaaaagtatcgcggtccaaacaccattcgatatcttgcggctggccgaaatgagcttcgatctgtctcccgatacgtgccagctgtaaaatttgttcatcagtcagtgtttgaatcttttgctgatcaagagcgatctcctgtgtttctgttccgccttcttttcgtccatagatagccaattttttagtttctattctcttatcgacgatttgcccgtcctgtactttataacaatcggcagagactaagccggagaccagtgcttcaccaagtccaaaaccggcatcgatggatagcagctttcggtttccggtcatcggatcagcggtaaataaaattcccgaagcctgagggaacaccatcctttggatgataacggataaataaacttggctgtgttcaaacccatttttcatacggtaaatgacagcgcgatccgtaaatagggacgcccaacatttactgatatgctgcaagatcgtatctaagccggtaatatttaaataggtgtcttgttgaccggcaaaagaggcatgcggtaaatcctcagctgtcgcactggaacgtacggcataggcatgttcttcgccgaaccgggagagatggcaagcaactgctttgactacatctgaaggaatttctgcttccataatggtttgccggatttttttgctgacatcaccaatttgatcccgattctccactttcagcatggtcagttgatccaacagcgcttgtaacgtttcgttttgttcaatggctttttgatatcctgcggttgtgacacaaaatccttccggtacttgtattccttgaatttttgataattcccctaaatgtaacccttttcctccaacgagcaaaggctgtgttttttcaatttcgtgaatgccgagaaccaaagaactcattctatatctccccttcaaaaaaatttgacaagagcttttcagcatgatataatcataatataagatggatatctatgacttttcacaaagaaagcgcgcgtgttctgattatatcaccgtgtctgtttttgtgcaatataaaaagaacctggccaatttggcgaggttctttcttcatttttgtcgaaagctctttaaagctgtattgagatcttttgtgtgaacgtaaatgttcttatacaactcgaatagtgttttatatttttgaacattttgttcttttggataaaatgcagctgcttcatgaatgaactgctctgcacattcttcaagagagtcaaaccacccgcttccgaaggcagctaacatcgcagcccccatggcgggaccttgttcattctctaacttaacaaccctcgtattgaaaatatcagcctgcatttgaagccacgtttcatttttagctcccccgccaatagagacaaccgtatcaactgattttcccgcttcgcggaatagctcaattgattcatataaagagaatgtgatgccttccattatcgccctcaaaaagtgctctcttttatgggctccgtccattccgatcaagcttccccgaatagatgaatcagcatgcggcgttctttcaccgactaagtaaggagtgtacagcagtccatttgctcctatcggaacagattccaccccccgcaataattgttcaaacgattcgttcggcgcaaacgttcttttgaaccagtctaagctgtatccagcagcgagcgtgactcccatcgtataaaaagaatccttctttccatgattaaaaaagtgcactttccctttaaagtccctttctttgtcttcttcacaggaaagtatgactcctgacgtcccgatactgcataatgtttttccggaagaaagaataccggctccgacagcaccgcaagcattgtctgctcccccggcgtacacttttgttttttccaacagcccagtctccgccgcaacgctcggaagcagtgatcctacacagtcatgggattcaacaagcggaggacaaatttccgctgaaataccaaattgattgcaaatctcatcgctccactctttgcgggtcatatgtaaaagtaacgttcccgccgcatcggagtattcagtgtgaatggcgccagtcatgcggaatctcacatagtctttcggaagcaaaaaaacagcggttttgttaaaaagttcaggctcatgtgccttcacccataacattttaggtaatgtaaacccttcaaggacacggttttttgtgatatcaagcagatgatcgccaaatgtctcggtcatcctgctacattgaggcgtcgttctggtatcattccaaagaatcgcatgacgcaacacccgccgatcttggtcaagcagtactaacccatgcatttgtcctgaatagctaatcccgtcaatatccccggcttgaacgttggatatcgaaatcaattcagccaatgcttcaattgtttgctgcacccagtcttcaggattttgctcactatatcccgccttctcttggatgagcgggtaacttttggacgtttctgcacaaaccttgccgttttgattgactaaaatggttttaacggcactcgtaccaagatctattccaatgacatacttcattttttcactccttcctctctaaatagatccccattgaattgacccgccataacagtaacttcatgacgggccattccgggaacttggctgcctgcatctttttacagcgggatctggagcttcttttttcatttgttatacctgtaaaatgtattgatttaatatcgcttttaaccgctcctgtctccctgattcgtttttaattggctgattgttcagcgcatattgctcaagtgttttaaaatcagctcttccttctgcaatttcaagaccaatcccttcagtaaagctgcggtaacggtgttgaatcacatcttcaaacacacgatcttcgattaatttgtgggcggctttcaaccctcttgcaaatgtatccatccctgcaacatgggcatatagtaaatcatcaggctcaaaagaagatctcctgacctttgcgtcaaagtttaatcctccgcttccaagaccgccattttgcagaatttcgtacattgctaatgtcgcagaatataaatctgtcggaaattcatctgtgtcccagcctaaaagcggatcaccctgattcgcgtcaacagagccaagaaggccatgcactctcgccatgcgtaattcatgttcgaatgtatgcccggctaatgtggcatgattggcttcgagatttaatttaaaatgattgtctaagccatattgctttaaaaaggcaatggttgttgctgcgtccgtatcatattgatgggtggtcggctcttttggttttggttcaatcaaaaactgccctgtatacccgatttccttcgcataatccactgccatatgcataaatctggccatattatcaagctcaaattttaaatcggtatttaacaaagtttcgtacccttcacgtccgccccaaaatacatagttctcggcgccaagctcttttgctgtttctaatcctttttttacttgggctgcggcatacgcaaatacatctgcattacaagaagtcgccgcaccatggacgaaacggggattcgtaaacatgtttgcagtattccataatagcttaacgccgctggttctcatgtagtcttttatcatgtccacgattatatccagattttgatttgtctcttttaacgtacttccttccggtgcgatatcccggtcatgaaaagcaaaaaatggcgcatccagtttttcaaacagctcaaatgctgcatctaccctcgctctcgccagatccaagcctttatagtaatcccacggtctctgcatcgtagctgcgccaaaaatgtctgtgccgtcagcggtaaatgtatgccaataggcaatagaaaatcgcaaatgctctttcatcgtttttccgccaattacttcttgagaattatagtatttaaatgctaaaggattcgtggattctttcccttcgtaaatcactttgtttgcgctttcaaaatagttgaccgaaccggaatgagagtgagccatgtgtgatttcccccttaaaaataaattctaaacatgatcattcaaatacaaatgcttttatgtcatgttgcacattagtttgttgaccaaacaaactaacttattttcatcttatataacctcatcagtattttcaatattttttttagttttttacgaacacattagatataataaaggttggattcgctatgtactgcgtttcgcacgataacagagaacgttcaacttaatttaaagattatacaaatggagtggatgaagtggatatcgctgatcaagcctttgtcaaaaaagttaaccaaaagttattactaaacgaaatacttaagaattctcctatttcaagagcaaaattatctgaaatgaccggattaaataaatcaactgtttcgtcacaggtaaacacattaatgaaagaaaacctcgtatttgaaatcggtcagggacaatcaagcggaggcagaagacctgttatgcttgtttttaataaaaaagcaggatactccgtaggaatagatgttggcgtggattatgttaatggcattttaacagatcttgaagggacgatcgtccttgatcaacaccatcatttggaatgcaattctccagaaatcactaaagatattttaattgagatgattcatcactttattgcaaacatgccgcaatctccatacgctcttattggtatagggatatgcgcgcccgggctgattgacaaaaatcaaaaaattgttttcgctccgaacgccaactggagagatattgacttaaaatctttcatccaaaagaagttcaatgtgcccgtttttattgaaaatgaggcaaatgccggcgcatacggagaaaaagtatttggagctgcaaaaaatcacgataacatcatttatgcaagtatcggtacaggaatagggatcggcgttatgatcaacaatcatttatatagaggggttggcggattctctggagaaatgggacatatgacaatagactttaagggtcctaaatgcagctgcggaaaccgaggctgctgggaattgtatgcttcagagaaggctttattaacatctcttcagacgaaagagaaaaaagtgtccagccaagatatcatagaccttgcccatctgaatgatgttggaactttacaggcattacagaattttggtttctatttaggaataggcctgaccaatattttaaatacatttaatccgcaagccatcattttaagaaacagcatcattgaatcgcatcctatggttttacattcaattaaaagcgaagtgtcatccagggtttattcccaactagacaatagctatgaattattaccatctatcttaggaaaaaatgcccctgctctaggaatgtcctctattgttattgatcattttctcgacatggttcataactgaatgtacatacttctatgttttacgctcatctttaaagatgggtttttttattctaggagtatttctgaatcaatactgacataggcaccttctaatatgaaaaaggagttctaaaatagaaatctcctttttcatgtgctaattatttttctttataacgaaaatatctgaagtcggccggaatatgatgaccgctcgtatcttggcattgcatccctacaaaagctcctgtaaagaatcccccgccgcggatgtaatcatctgataattttttcgattctaatgcaatgtcgattttgtgccaatcttctttgttaaatgaatacaaataataatatttttcgttttcaatattcacttttaaatagacatacttgacttcacgaggaatcacaattttattttttaacggttgtgaaaaagaaaagttatcacatatcgttaattcaagaatacggccaagttcttcatcatacgtgacttgaagagccgtccagttctctgtattgtaatagttcaccaaaccagcggcttgctgaaaattttccggataaaacgcaacagccgtttccgcttcaaaatggaggctttgccagcgtctggctacaaatgcctgagtaaatgtcgaagttaaggattcatggccatataatcgtaaatgatttggcgcttgagttaatgaacctaatttctccgtaaacgggattcttaacgtttgaaaattaatatttaatgttgcatcctcaaattcatcaacttccggataggtttcttcaaacattgtttctggtatagaaggcgcatccacttccaagctcccttcttttccgccttctacataaggccagccatctttccaatagagcttttgaatagctgtttctctgcccagaggacaatatcctctctgctgaaaaattgaatcatcgtccggatgaatgggacgtcccgttaaatgagctaaataccactcacctgtatgtgtttgtacaatggatgcatgtccgcatttttgcagcggattttccggcgcatgccatgacgttaagattggattatcaggatgtacttcatatgggccttcaatatttgcagaacgggcaattgtagcagcatgttcgaaccgtgttcctccttctgcggttaataaataataatagttcccgatacggtaaaggtgcggcgcttctgtcagctttctttcagttcctttaaaaatcactttcggtttaccgattagtttttgctccttatcagaatattcctgcatgacaatgcctccaaaggagtgccgatcaatacgctgatcccataacatatttaataaatattttttcccatccgtatcatggaacaaagaagcatcaaaacccgagctgtttaatgtgatcggctccctccaatcaccatcaatcgtgtcacaagtcactaaataattgtggcaatctttccaggcgccatctacaaccttaacatccgtatagatcagccaaaactttccgtcgctgtaacttaaacatggcgcccagaccccgcctgaattaggatttcctttcatgtctaattgcgaaactctctgtaatggatgtgcaactaagtgccaattgactaaatcttttgagtggtgtatctggactcccggaaaccactcaaatgtagatacagcgatataataatcctctccaaccctgcaaatactcggatcggggttgaatcctttaagtactggattgatgatcttcattttgaactcctcctcagctattttctgttgactcatcatgttttaagctttgaaatcgtcaatatgatccaaataaactttgtctctattctctaattctcgaaccatgcttttatattttttctcatctaagttatagaaattaatatcaatcatggccagaaccagtaagaacacgggaataatggttgttgtaattaaaattcccgtcaatgcctccggcgtttgcacctgatttgccacatatccaaactgatctagaaccaaacccggtacaacccctcccaaggccatgccgaatttaaagaaaaatccgataatagcgtatatgagaccgcccattcttttcccggtcttatactctccatattcaattgtttcaggaataagcgcccacatatatcccccggcagtgagacttcctgcagcagccagcaatcgaaaggaaagtatcaggaatacattacttgacggaacgaaaagtaaagctaagaggccgatcatattcagtaataatgcatagtttagtaatttcttcttccctaataattgatgaagctttggaataaacggtaaaatgaccaaagcaggcaaacttcccaacaaaccgtaccacttcactaaatccgctctttctaaattatacgttacgtaatagatgccaaccgaattactgattgaattcactccaaaaataataataaagaaaatacttaatacaactagaggccgattaacacgaaattgctcaaatatatccgaaaatttaattttttcttccgatttttgaagcgtgacacgctcttttgtgcttttaaaacaaaagattaaaaggcacccgcctataactcccataatacccatggttagctgccagccaagagattcgctgccggaattatcgcttaaataagcagccagtaagggaacaaaaaatgcaacgacaagtcctccaagattcgcaaataacatacggacagacgttatactaacaacttcttgattatttctggtcattgcagatgttaacgcgccatatggcacgtttatcatggtgtatgtaagcgataagccgacataggtgatataggcatatattaatttccccatatccgaaaaatccggggttgtaaaacagagtattgccaatatgacaaagggaaaagctccgaataaaagatacggtctgaagcggccaaacctgctatttgttctgtcaactattgttccaataaaaggatcagcgagagcgtcgatgattctaaccactaaaaacatcgtaccggctgttgctgccgataaaccaaaaacatctgtatagaagaacaaaagatacgtagacactgttgcataaattaaattacatgcaaaatctccagacgcatatccaactttttcaaccatgctgatcttctttacattttcactgagcatgatttctccccttttcgatcctttacataaggaacatgatgaaatggtataacatttctttaaaattatcggccagtgagcggcatataaaagcgctttcaaaaaaatgatagcggtttactttcacagagcattttcaacatccaaatggtgatcagatagcagtgaacaggataaaagcttggctttcgctttttatatacctccaattaaatcgagcctcttatccccctcccatttaagacctttacatgatggacaattaaagtggttttattagtttgttgatcgaacaaactaacttgatttcatattataaaatcttttctgctttttcaactcttttttcagagaatttaaaaccgaccaaaggacataccatgttgtaattgccgactgcttcgacagacgttaagtaaaccccctgtgtcacctgactgatttattaaatgataagcacttccatcatcttttgtttagaaaaacttattaagaaacatgcacttgaaaaaatgcgaatcatatataagtgatatcccgtttaattggttgaggaggatattatgaaacctatgctgccttttgaaaaatattttggggatttagaactgatttatgcattttatggagctatgcctaccggtgttactgtttcagaaactggtcgtattttcatttgttttccgaaatggggagacgatgttaaatttacggtggcggagataattggggataaattgcagccttatcctgatttacaaaccaatttggttaaccctgagaatatcaaaatgactttcatcagtgtccaaagtgtagttactgatggaagaggaacgctttgggtactagatacggcggcacccaatttttctgaaccaattaaaggcggggcaaaattagtcgctgttgatttaaaaaccaatacaatcagaagagtttatacctttacagaagatgttgtccttccaacaacttacctgaatgatgtccgatttgattttcgtgttggaactgcaggttatgcctatataacggattcttcttccaaaggaccaggagctattatcgtcgtggatttagaaaccggaaacgcatttagacggttaaatggagcaaatccaacttcaccggattcctattttataccgaaaatagaaggcaaaattttgatgaatcgtaacagggatggttcaacttccccatttaggctggcatccgacggtattgcgatttctcctgacggaaaggtattatttttttgtccactgaccagccgtcatctgttctcgatctcaacagaagccctgagagatagaaatataccggacatggatttactttatcatgtggcgtattggggagaaaaaggcgcgtctgatggaatgattacagatgcgaaaggagccatttatgccggagattatgagaacaatagtattcgaaagatgctgccgaatggcacaatggaaaccatcgcacatgatccgagaattttatggccggatactttttcgattggtccggatgaatacttatatgtcatcgtgaaccaattacatcggcaggctagatttcattatggaaaagacttacgacagaaaccttatagtttacttcgtatcaaaattgatgaatttcctgctcctgctttttgaaaataaaaatggccggttcaattttagaacataattagcttcatttagccttcatcctaaaccgaataaggggttacaataaatacgtgtcctcaattataacttcaattttttttggtcatattctggtcaaggaccaaaaatgttgttcttttaatcttatgaccaaaaccaaaaaatcccctggcaccaatagtgccaagggattgagagattaatactgagacatgtattgttcgcgctcccacggatgaacctgtgtgcggaacatatcccattcgatttcttttgcttcgatgaagtgttcgaacaggtgctcaccgagtgccgcaaccatgacttcgtttgatttgaattcgtcgagagcttccgccagcgtcgccggaagatctacgatgccgttttccatgcgctcttctttgctcatgacgtagatgttgcggtcaatcggagccggtgcttcaagtttgtttttgattccgtcaaggcctgctgcaagcaatacgcttaacgccaggtacgggtttgccgccgggtctacgctgcggacttcaacacgcgtgctgatgccgcgggaagccgggatacggatcagcgggcttctgttttgcgcgctccatgccacgtagcaaggtgcttcatagcccggaacaaggcgtttgtaagagttcactgtcgggtttgtgacagccgtaaagcttgtcgcgtgttttacgataccggcaatgaaatgttttgctgtttcactcagctgaagatcagcgtctttatcaaagaacgcgttaacgctatctttaaagagtgataggttgcagtgcataccggaaccgtttacgccgaacagcggttttggcatgaatgtcgcatgcagaccgtgtttgcgggcgatcgttttgacaaccagtttgaaagtttggatgtcgtcacaagaacggatggcaccagcatatttaaaatcgatttcgtgctgacccggagcaacttcatggtgagatgcttcgatttcaaagcccatttcttcaagctcaagcacgatatcgcggcggcagttttctcccaagtcagtcggagccaggtcgaagtatccgcctttatcgttcaattcaagcgtcggttcgcctttttcatctaatttaaacaggaagaattcaggctcaggtccaagattgaaatcgctgaaaccgagttctttcatttctttcagaatccgtttgaggttgttacgcgggtcaccttcgaacggcgtgccgtccggattgtaaatgtcacagatgaagcgtgctactttacctttttcagccgtccatgggaagattacaaatgtgttcagatcaggatataagtacatatcagactcttcgatacggacgaaaccttcgatggaagaaccgtcgaacatgcatttattatcaagtgctttttcaagctggctcacaggaatttccacgtttttaatcgttccgagaatgtctgtgaattgaaggcggatatactttacgttttcctcatttactaattttacgatgtcttctcttgtgtactttgccatttcgtaaaactcctcctctaaaaggtaaatgtatatagcaaaacagttgctaacggattaatgaaagaatcgggacatgtcaccttggcggaaagtatttccccgctggaaacggcctgcctgcatcagttcgtttttcagaagctttctgagttcgtcatcagacagattgtgcttcatcggtttggcggttttttcggatttttcttccggttcggcagatgccttatccagaatttgtttgatccccgccatattgacgccttgttcaatcagatttttgatttctaacagtttatctacatcatggaatgaaaataatcgtctatttccttcgcttctcgctggaaatatcaatccattttcctcataatatcgaatttgccgggcagaaagttctgttaactgcatgacaatcccaattggaaataaaggcattgagcggcgaatgttatcactcatctcaatttcctccttttcttatcttagtctcattataggtgatgttatattttgtgtcaacacaatgtaaggaatcttaacatcaaattctttgaaaattgcaaacggcctaaatcagctctttttccattaaagcatttacggcgctgcaaatcgcatttttcacgtgcgcgtaggttaatcctccttggacatacgcgacataaggcggtctgataggtccatctgctgataattcaatgcttgctccctgtacgaaagtgcccgctgccataatgacatcgtcttcatatcccggcatatagctcggataaggcgtcacatgcgcattaatcggtgaagcatattgtatcgcctggcaaaaagcgatcatcttatcagggtcctgaaactcaactgattgaatcagatccgttctcggcgcattccatgcagggtttgacgtaaagccgagcttttcaagaaaacgggcggtaaataccgctcccttcaagctttgcgccactacatgcggagcgagaaagaaaccttgatacatttcctgcagtgaataaagcgaagcgccggcttcacttccgattcccggggaggtcatccggtaagagcaggcctcaatccacttggctttccctacaagatagccgcccgttttagcaaggccgccgcccgggtttttgatcagggagccggccataagatccgctccgacgtggcagggttcccgctcttctgcaaattctccgtagcaattgtccacaaaaacaatgacatcttctttgatttcctttacgaaacgaatcatctctttaatttcatttattctgaaagacggacgattcgcatatccttttgaacgctggatgccgatcacttttgtattcggccggattgcagcccggaccgcttcaaagtccactctgccttctgatgttaaatcgactgcattgtatccgatttgaaattccttaagcgagcctgaatactccccgcctcttactccgacgatttcctcgagtgtatcgtaaggcttgcctgttatataaagcaattcgtccccgggtctcagcacaccgaagagcgcgattgaaatcgcatgcgttccggaaatgatttgcggccgcacgagtcccgcctctcctccgaacacatcagcatagatcttctccagtgtatctcgtccgatatcatcataaccgtatccggttgaaggcgtaaaatgcgtatcgcttactttatgttttctgtagctttgcaggactctccattcattccgttcactgatttcttctattcttttatgaacggcggagatttccgcttctgtttcttcggcggttttttgtaaaagagcgccatgggtcagtgtgtcaaacatgttgtgtataccttccttacatgaatttcttcagttctccgagtatgctttgttcttcctgtacataacctgagacttcgtagcgttcattttcttcattaaaataaaggctgtcgatcatggtctctgatttgatgcgtgacatcaatttgccttcggcggcaggcacatgaacttcatacggcgtcatcagctcccggcgcaaataagcttcgatttccgcttttagttttgcttcatccccggcgattctggcgctgatcatgatgtggccttctcccgctgtcgggatgaagtcaggaagtgtatcatcacgtttgttataagcggtcagcaccggaatatcatctgcctcaagctcttttaacagaccgaggacagtctgttcatgtccggcataatcttcattggatgaatcaatgacatgaatgatcaagtctgcttccttcacttcctcaagcgttgagcggaaagccgcaatcagcgtcgtcggcaggtcctgaatgaagccgaccgtatcagacaaaaggacgctgtagccgcttgggagcgccatctttctcgtcatcggatcaagtgttgcaaacagcagatcttcttcaaagctgtctgagcttgttaattgattgaaccatgttgattttccggcgttggtataaccgacgagtgcagcctgaagcacgccgttctttttacgtctctcccgataacggcttctgtggcggataaccgttgaaagctgcacgttaatttcgtgtatgcggtttctaatgtggcgccggtctgtttcaagctttgtctcaccaggccctctcgtcccgattccgccgccttgtcttgagagattgattccttgtccgcttagacggggcagcgcgtattgaagctgggccaattcgatctgaagctttccttctctcgtcttcgctctttttgcgaaaatatccaaaataagctgcgtgcggtcgatgatcttcgcttcaattgcagtggcgagtgatttaagctggctcggtgacagttcatcattaagaatgatcagatccgcttcaagctcttcacacagcgccttcagctcgtctactttccccttgcctatatatgtagcggcatccgctctgttccgtttttgcgtaatccgggtcagcaccgttccgtcagccgtttttgtcaatgaagcaagctcttccatggaatgttcaaagtgctcatctgtcatgtgcggaagctggcagccgaccaaaatgaccgtttctttttttccttcctgttcgttcaaatggatgttcctttctgtgtcgtattgggcagtagtactatcataccaaacccgcagggcgtataccacacatccggcgggttttaaagagagaaataaaaaagagacccctcaaaccggctgagaggtctattcgtaagctgccgcctcatcttttataagtaaatcctggctcttgatcgtcattaaatcgttttttaagtattggtctcccattaaaagtctcatggcctgagcgcggattgatttttcaatcacgtttctgacaaagcgcccgttgctgaatttaatggggcttgtcgtgcttttcactgtcattaagtaatcttttaacttccactcggcttcctggcttaattgatactcccgctctgctatcatgcgctttgcgatgtccatcagctgagtgacagagtaatccggaaaatcaatgctgatagggaaacgcgattgcaggccgggatttaatgacaggaaatgtgtcatttctctcgagtaccctgccaggatcagaataaattcatgctgtttgtcttccatatgcttgacaagcgtatcaatcgcctctttaccgaaatccttttctccgccccttgcaagtgagtatgcttcatcaatgaataaaatgcccccgagcgattttttaatcagatctctggttttttgcgccgtgtgtccgatgtattcaccgaccagatcggcacgttccgcttcgatcagatgtcctttggaaagcacgttcatttcgaagaaaagcttgccgatcagtctcgcaacggtggttttcccggtgccagggttccctttgaacatcatatgaagagcttgttttccgactttcagcccttgttcggcccgtttttggttgacgaatatccacgcgtaaatttctttaatgttgcgtttcatttcttccatacccactaatgtgttcatttctttttcaatttctttcagaatgctgtgtttggcttcatttttttgcagggcggcctgatattccgcctcagcttctgcatttgtcagcacttgcttttggccattaagaatgatgttaatttgtccgttatttttataggttacagcgcgctccaacatgctcacctctctgttctctctttatcttactcatgatgaagcggttccgtgacatccgcctatcatcatgagacccgttttcctctttatctgtcactttttccgttctcttcgggaatgatgttgaatcctgcgctttcccgagaaatatttttcatttcttattgtattcaacagaaacgggaggacaaaccatttatttttattttccgggaaatgttgggtatatttctcatttttttcatgaatgacagccgtacaagcaccttttgaatatcatcatatgctgtaatgaggtgatggagaatggttaaaatttttatagaccccggtcatggcggaactgattcaggtgcaaccggaaacggacttcaggaaaaagcggtcacgctggagatcgcgctggctttgcgcacgattctgacgaatgagtatgaaggagtttctgtcacgatgagcaggacaagcgataagacggtcagcctgacggaaagaacggatgccgccaacagctggggcgcagattattttttatccattcatattaactcaggaggcggaaccggattcgaaagctatatttaccccggtgtcggagcgccgacctcgacttaccaatcagccgtccacacgcaagtgattcaagcatcgggttttaatgaccgaggaaaaaaaacagccaacttccatgtgctgcgggagacaagtatgccggcgattttgacggagaatggttttgttgatacgtcagctgatgcaaacaaactgaaaacagccagttttattgaaagccttgcaagaggacatgccaagggcttggagcaagctttcggtctaaaaaaaaaggctgacttatataaagtgcaaatcggtgcattcaaagtgaaagcaaatgctgatgcgcttgccgccgatgcggagtctaaaggttttgacgcgattgtgcttccaaaaggcggcttatttaaagtgcagatcggcgcattctcttccagagattacgctgaagcgttggccgcgcgggccgaaaaagccggatttgatgccttcattatacaagactaaatgaaaaacccccgctctcccttttttgggacgaacgggggttttttgttattgaagtatatcggcgacaaactgagaccaagcttcaagacgctgatacacattttcctctttcagttcgctcagtttcatccagcggccggcgatttgatctttttctttcacttcgacttgtgccgcagacgctaactggagcgcagaaaggatgccgatatgcaccttccctacatcgttttcatcatcattgatcaggccgagtgtgacaatgttttgtttgtcctcctcgcgaatgtacagttcttccgccagctcccggtcggtattctgtttcagcacttccgaaaatgaagccgctccttccatagggttcatgtgtccgccgaagccgagagaaagcttattatggaggcgcgattcccctccgccggcgagccgttcatacacaaacacctcatcatcgcggcggatgacgacatacggaatcggctgtttaaatcgcgggtcctcttccgcgtcgcctcttctgatttcaaaaaaatgcgcctcaatttgagccataatgtttacgatacgttcatcctcgctgttgactccctgaaatgtcagcatttcgttttgaaagacgtcactccgcggtgcagccaagatgatttcatccattttattcatgcccgttcctcctgtcttacctctccattcaagccaaaagagcagatattatatctgctcttcatcttggccaaaataaaaatcttcgtccttaatcggttctaccgtcgcctttttgtagccgttccctttcatggagaagaaatcatgtgattttgttttggtgtttaatccgtttaatacgatcggattaatatcctcttcttcaaagtaaggatcgaaccctaagttcatcaaagctttattggcgttatagcggatgaatttctttacatcgtgtgagagtccgacttgatcgtacaagtcctctgtatattcaagctcattgtgataaagctcttctaaaagctcaaccgcaaattcgcgaagttccgcttttttcgcttctgtttgtttattgtatatttcttgggcaagcagtccgacatatacaccgtggatcgcttcatcacgaaggatcaggttgataatttcaccgctatgcatcagttttccttgtccgtagaaatataacggataatagaaaccgctgtagaataggaagctttctaaatacacagatgcaaccatggctttgaacagtgaaatctcgtcatcttttttaatcgctttgtagagtccgacgatgatttgcgcttttttctgcaaaaatttgttttgtttgacccattcgaatacttcattaattgtttcagtcggtgccagtgtcatgaaaatattagagtacgattttgcgtgaacggcgttctccatcatcgccataaaattcagcacggctttccgctggtggccgtctacgtgttcagccacgatcggcattcctgtattcccctgctctgtatcaagaagagtcaatccggccagtaccttcatatacgtgtcttgctcgtttttcccgaggtacttccatgtgaggatatcgccgtttaaagcaatctcttccggaagccagaactgtttcacattttggttatagaacatttgggtaaagtcgtcttcatgctttgaccagtttgctgcgtcataaattttcgtcactataaactctcctttaatcaaacaacacaagaaaggcagctatcttgcccggtatctttcgttcttgcatagtaaatggttttgatgcctctatggtgggcatacagatcaatacggttcagatcacgagttgtcatcgtatctttcaaaaacagggtaaagctgattccctgatcgatatgctgctggattgtcgcgatcatatccaccactttgaacatgtccatatcataagcttctttgtagaagaaccagttattagacgctaatcccggcatcgggtaatacgtttttgaatttccgtatgttctttcttcgatccgttccatgatcggcataacggacgccgtgctggattggacgtaggaaatggagcctgtcggcgcgatgcacagtctgtagctgtgatacataccgtgttcagcgacaaacgccttcagctctttccagtcttcgattgtcggaatgtgcatgccctcaaagagcgcagcgattttttcgtatgccggtgagaactctttttcgatgtatttattgaaatattctcccgttgcataagtggagccttcataatgctcaaacgtttcgcctttttctttcgcaagctcagctgaacgctggatggaataaaagttcaccatcataaagaacgtattcgcgaaatctcttgcttccgggctttcataagcgatgccgttttgggcaaggtagccgtggaggttcatggcgcctaaaccgatcgacttcatcgctttgttcgcgcgtctgactgccggcgcgttgcggatatccgtcgtctcagatacatgagtcagggaatccgtcgcgagtttcaccgtgcgctcaatcgatttatgtttcatgacattcaaaatatttaatgaaccaaggttgcaggaaatgtccaagccgatttcgtcttcttcatcataatctgtgtaagccgaaacttgtgacgcttgaagcacttcagagcaaaggttcgagaatttcacttttgatacgtggttattcgcgtgctctttgtttacgttgtcctggaacataatgtacggataacctgactcagaacggagaacggcaagcttttcaagcaatttgcgcgcattcactttttcttttttgacacgcgggttgtcgacaagctcctcatacatcgccgtcatgtccatttcgtccatatgctggccgtattctttataaatcgtatgcggatagaatacataagccgctttgtcctcacgtgcaagctcaacgaacttatccggaatgacgacaccgatagaaagcgtcttgacgcgcacatcttcatccgcagaaatctttttcgtatcaagaaaatcattgatatcgcggtggaaaatgtttaaatacgccgcgcccgagccttgtctctgtcccatttggtcagcgtaacggaacgcattatcaagaagcttcatgacgcctacaacgccttttgtggcgttttcaacatctttaatcgcttcgcctttcgcgcgaagcttggacaggttaagagaaaccccgccgcccaatttagacagctgcatggaaatatcgatcgcccgtgaaatatcgtttaaggaatcattgacttcgagcaagaagcagctcaccagttctccgcggcgttttctgccggcattcaaaaatgtcggtgtactcggctgatattcctggttgatcatcaggtttacatattcttttgctttctcagtatcgccgtttgcgaagaacagcgcgacgattgagattcggtcctcataacgctcgaggattcttttcttgtcattcgttttcaaagcatagtcattataaaatttaaacgcactcatgaaggaaggaaaacgaaacttctttgcgtaagctgtcttaaacacttctttaatgtcttcaaaagagtaaaggcttaagaattcctcttcgtagtattggttttcaatcaaataatccagcttctcttttaaatcgtgaaagtaaactgtgttttgattgatatagtcaacaaaatagctatgtacagcctctttatctttatcaaactggaattttccatcttgttggatcatgatttcgttatttaactggatccattttggcacttgattttgtgacaactctttctacctcctgagtaaacaattcaacgtctttagatgtgccgctgagttcaaatttgtgcaagatcggcacctgatattgtctcgaaatggtatcggcgctttttgcaaagttatcgccccatactttgttgccgctcgcagcgactcctaataagagatgggcgtatttttcgagaaatgattgtgttgatgccggtacctggccgaagtttgtcgtgtatgtgaccaaaacaaacggagtgtccacgtggtccgtttcgtccaccttgcggatcagctgaaagtctgttttattcacaaaacgctgaacattccctgtctttgaatcaaatatgatttgaaccatccttatcacgacctatcaaaaataatgaatctcttaacactatatatagtatactaacctctcagaaaaacacaacatattgagatcgatttataaaaaattcatatttttgaaagagcggactttggctctggcccgattaacgcccaaaaaagagagcagaacgagaatcatctctcatcctactcaaggtgtcatgtgtaagccgatgtctatcataacatgaaaaaaaactgcttagtagtctagacttttattcttattttttgtaagaatcacattttttttcgctttcaacggtttcttcaatctccacatcagcaccgatttctttcagtacggctttcagagcgcttgtgatggaagcctctctgatcagttctttgccgtcaacgatgatgctggttccatattcatagcaggaatcatcttcacaagtttcttcccaatggttgattatcaccttgtgtttcaatcgtctcaccctctgcatgatcaatgtcagtacttagtgtagcttgtgcggcccgctttgtaaattcgaacgcttgtgaaatttattcaagctcatccagcgccgtttcttttttcagttcgattttattcgttttttcatcatagcggtatatttttaagtaaccgtcctcgacgatgccgaaacgattatgttccagctgcaccatgccttctgtctgcggttcggcatccgatgagccgccgtcatcatccgtcaccaccgtctcatgattgctgcaagctccaaacagcaaaaaaacagcgatccaaacgagcgtaatcctgattcttctcagttcattttcactttcgaacacgattttccgaacccccttttatgtttccgatatacggcctgcaatatacagatgcgcatagaaaaagaccattgttcatggtctttttcaaaaagtctattcaagctcaagctggacgtttttttgcggggcgaacgtggagatggcatgtttataaataagctgctgcttcccctccgtttcgagcaaaacggtaaagttgtcaaagccttttacctggccgcgaagctggaagccgttgagtaaaaacaccgtgacgaacgtattgtcttttcggatttgattcaaaaactgatcttgaatattaatcggtttcatgtttcgtcctccttggttctcaatacaatactgtttcgattaaatttccagttttcctgctatgcactcgaaaatttccttttttttctgctcaatatcaacaggcggcgtcatatctgtccatgaaacgggcattttattgcgaaaccaggtcagctggcgtttcgcatatcgcctagaattttgttttaattgctccacagcctgagggagcggcacttttccatcaagatattcatacagctctttatagccgatcgcctgaatcgattggctgtcccggatattcatatcatacagccgctttacttcgtcaagaaggccggtttccagcatcaggtcaacgcgctcgttaatccggccgtacagcacttctctgtccattgtaagaccgataagaaccgcattgtaaagcagctcccgtttttgggttttaagatgctctgacattgtttttcccgatacatgcagaatttcgagcgcgcggatgactcttcgcgtgttgttttgatgaatggctgccgccgcttccgggtcggctgccgcaagcttggcatgaagcgcttccgccccttcttcagccgccagtttctccatgcgctcccggaatacagggtcgccggagttttccgtgaacgtatagtcatacagcacggactgaatgtacagacccgttcccccgacaatcatcggcagctttcctctatcggcaatctcggtgatttttccccttaccattttctgataatccgccgttgaaaaagtgtcggacggctccaaaatatcaatcaggtgatgcggcacgccttctgtctcttcttcggtgactttggccgttccgatgtccatccctttatatacctgcatggaatctccgctgatgatttccgcattcagcattttcgcgagtccgatgcttagttttgtttttccgactgccgtcggtccgacaagtatgacgacaggctgttttttatttttcaatatgtatcactctcttttataaatctccccctaattatagcattcatttcttcaggcacctatccattttgccctttttcctgagcgctaaacgtccgctaccacccgatcggctcgtttccgacaacctctctcgtttttcctttgagcgtatggcggtgcgttttccgtccttcctcccacggatcgtaaacgacaccgccgtgctggatctgaatcggctcattgtaggcggcaaaggtggtctctgaaagctcatggtaatgtgttccgtcaaccctcgggatggcagggccggaaatgccgtaatacctatgaaaatggccgttttcaaacgaggtgatgcccgtatagaaatgtgtatgctcatctgtattgctgccgttctccggttgcgaaaagccttcgatcacatggtaatgtccctgcactacatccgtaacagcccggtatgcgtgtgtgtgcggaggtttttttgaccaatctgactgatacaggcccacaaaagctcactcctttatttttttgataaacgcccaatcaaaaattggtgggctgaatactctgttatcatctcaaatttattcttggaggtacctaaattatgaatgaagaatacacatacgaagcagatagtgatatgagacagtttggacggcccggatttgggttcggacggccgggattcgggttcgggcgtcccggattcggattcggcttcggacggccgggttttggttttggccggccttggtttggccgcccttggtttggcgggttcggacggccgtttggtttttacggcggaccgtttgtcggagggcttgtcggggggcttgtcggaagcgctttgttcaatccgtatttgtacggaggttacggctacccttactatccgtattactactaagacaatcaaaaagggctcctttcaggggcctttttgtataggcctaatgtcttgacttggcgggcaaagttcggatattattttattttactgccttaaacaaaaggcataaggattatgatgagagggggatttgatatgattctgggttatatcttcctcacaattgctattttatcagagtcaatcggcgcggccatgctgaaggtctcccgcggatttacgcggtttttgccgagcgcgcttgtagtggcaggctattcattggccttttatatgctttcactgacactgaatctcattccgcttagcttatcctatgcaacatggagcggagccggaacggtgctcgcatccattatcggagcgaaatggtttcatgaaaaactggacaagcaggccgtcatcggactctttttcttattggccggtgtcattttgatgaattggtagaaaggagaggcatgctgatgaaaggattactttgcttggcattagccattgtatcagaagtgttcgggagcacgatgctgaagctgtcggacggttttacgcacctgtggcccgctctcggcgtcatcgccggaatcggagcctcttttatgtttttgagcttctctttgaaaagccttgatttatccgccgcatacgcgacatggtcaggtgtcggcaccgctttaacggcaattgtcggcttttttgtttttaaggaggccatgacagtcaaaatgatgatcgggcttgttttggtcatcacgggcgtcatcctgctgaaccgttccaagtctcaaaaagctaaaaaaaatcaaacggcccggagctgaccgtttgaactcgtcaagcgcgggcagcttttacttcaacctcaagctccatctccacgtttccttggaccgctcgtgaaatcatacatgaggactctgctttttgcgctaacttcctggcgagcataaagtccgtttcggctgcatccggctttaataatataaacgggcggtgaatgattttctggtacgtgaacacaccgtttgtgacgtctacaattccttcagattccatatgtagatcttctttatccaagccgcttctttccatcatcgccgcaagcgttataatataacaggtcgcggccgctccaagcagcatttcatcaggatttgtgccttctccgggtccgtccatttccttaggaatggacacagccgtttccagccggccgcttttaatatcgccgacgtcattgcgatttccgggccaatttgcttttaaataaaagtgatgttttgccaagggacaaacctcctttttttcagtttactcatctttcactcgtttgtctttttttaagcttacgaatactcttgattgatcactctttttatcgtacggacaaaccggtaaaattcctccgtttttgtgaattccctttcgcggtaatcaaaattatcaaaaaacgcttcccgctgttctctgctgatctcaagctgtatgctcagcccggtttgcgcctggttattgatattttcggtgtcaaccccggccagaccggtttttgaggttgccaattctgcagaaaatccgtttcgttcgagagctctcaccaattttttcgcccgcttccggtcgcttcctccgacaagagtatttttctcgtcgcctttataaccgtgaactgcgataacataatggtgctgcttaatgctttcgactgctgaaggctcatcgaacctggtgctcgtaatatgaagagtctggttatcatgcgtttttaatccctcaaacagataggttgaataatcatctctgaaagagcggacgatctcgctcaccccgccctcaattctccctccgtgcggcgacatgatcaatacggggctcccctttcgcttattgtacgatatatgataatcatcggggtcttcatgttcagccaaatctttaaaatctgtgtatgtatcagaagaattcgagggatcagggtctgacgcataatgagcacatcttattagtaagaccattgctacgataatgatgacattaagtaaaattcttttcatcagctctccttctttgctcctttctgaaaaatgacatgttcattatatggatttttgtcaataggtcttatcttaacattctattaacattatcatcagtgaaaaacttcccggtttcgaaaaatcaatggattgtcacggttcaagcgctcaaatgccgggcatcagtgaaaaaaggttgagagagggcaaaaaaaaagggaggaacgcccgaattttcaggggcgggagattcacggccggaaacggacggcatcaggaatacgcttttaaaaatgaatatccgcctcccgaagcaaatgcacaggacagaatggagcccgtcaaaaaagttctcatctgcctttttgtacagcaaaatgccgttacagcccgctcatcccctttttttatcataatggtccgttttgaaatggagccgtcttttttcatatatataatatcaatcggaagctgtttttccaaggaatgtctcaatattatgttcatatatatacctccttccgccggcttcactataaacgaacaaacgttccgtttcaactcgatttcttctcctgaaaaagccgcaagtaaccagcgctcctgaaggacaaacaaactgaccgaacatacggcctgttcatatggtatagagagaatcgccagaatgggaggaaaagtatatatgtttggttactcaatggtacaaatggtgcggtcaaatgctcataagctggactggccgctcagagaaaacgtattacagttatataaacctttcaaatggacaccttgctttttgcacaagtttttcgaaaaaaaggtgaaaaacagaaagaaaatgtcagtcatcattgaatttgaagagggctgccatgaatccggttttcacagcacaggacaggtcttatcaaaagaaaaacgctgcaccataaaaaagcagtttcaaacaatcaattgctgcagcgccgaagtcactccgtccgcccttcacatgcttctttcgcaatgccgggatatccgtaaaatctatttaaaccgtgaagtaaaagcgctccttgatacggcagctgaatcgtctcatgcaaaagaagtgacccgtaacggcaccgtattaacaggaaaaggcgtaaccgtcgccgttattgataccggaatctatcagcatcccgatttagaaggcagagttatcggatttgcggactttgtcaaccaaaagacagaaccgtatgatgacaacggacacggcacccattgcgccggtgatatcgcaagcagcggcgcttcatcttccggtaaatatcaggggccggcgccggaagccgatctgatcggagtcaaggtattaaacaaatcaggatcaggaaccttggctgatatcattgaaggtgtggaatggtgcatacaatataataaagaacacacaaagaatccgatcagaatcatcagcatgtcactgggcggagatgcgctcagatatgataaagaaacggacgacccgctcgtcaaggccgttgaagaggcatggaatgaaggaatcgtcgtctgcgtcgccgcgggcaactccggtccggaagctcaaacgatttcaagccccggtgtcagcgagaaggtcatcacagtaggcgcctatgatgacaatgatacggccggcaatgaggacgatacggtcgcttctttctcaagccgcggcccgacggtgtacggaaaagagaagcctgacattcttgcgcccggggtcgatatcgtatctctccgttctccgcgttcataccttgacaaattacagaaatcaaaccgtgtaggctccttgtatttcagtctgtcgggcacgtccatggccactccgatctgtgcgggcattgccgccttaatccttcagcagaacccgcagctttcgcctgacgaagtgaaaacactgatcaaacaaagtccggataagtggacaaatgaagatccgaacatttacggagcgggcgcagtaaacgctgaaaacgccgtgccgaaagagtaacctttttatcatgagaacggggtcgtctaaacctgcagatgaccccgttttttaggtgaacagatgaaacatttataatgaaggaactcggaatgctccagaaccggctgtcagaaaaaaagatcaatgcaaggcagtgtatttctaaaaaaatagggaataagtatggtgtagataaaaggaggaatcacaatggcacttacaaacaccgaattgtctgaatggctgcaaaaacagatcggacaaacgcttgatatcaggaaaggagagctgacagacagccgaaacgagatttctgatatggatcagatcatgcttcaccttgatgatgttctcgtccgccggacaaaccatcccgatgactatgtagcggacgaagaactcgtcttaaaagggcacggcacaacctatacggaggaaggaaatgtcccgcttccccaagatgcgtatgaaatccctctgctcggcgacatcaccatccaaaaggagcaagacggattaaaggtacatacagatcgggccgtttatacaatcgggacccggaaagagcaataaaaagaaaaaacgccctgaatcagcggcgtttttttattggtttttttcttctgaatatccgtggaacatcgtgaatgcgcaaagcataatgcctaaaataatgataatcggaagccagatcacggcaaacttataatccggttcggcaaaagcgccgatgaccgctccaaagcaatacagcaccaaggcaagcgcgcgcaatacagcatctctcgtaaactgcttccgcttgtccgctttgtaaaaccttgcggtgagatcttcaaaaaaattagcgagcgttcccgttaatacggtcgtggaaatccccgctacaccaagttttctcgcggctgtcgtctgcattcccattgcgaagctgagcagcataatcagcacataaacagaaatggcatctgcaaaaaagcaggagaacaaagcaaacagcagcaaaacagctccttcaatagctaaagcggcagttaccgcagggggccagaatgatttctttttattgcccacaagcagggccgcggcaataacgccggcaataaatccgattaacgaggttaacgatttgagtacggcaaggtgccacgagttgccgatcgccaggccgaacagaacgatgttccccgtcatattggcggtaaagatatgtcccaggcttaaataaccgatcacatccacaattcccgctgttaaacaaagaagtaaaagtgcaatatttcggtatgtagtcactgtcaatgtgatccaatcctttctcatgctgattccaacatataagtttactctttgccatttcatatgtccagccggcgtgccgctttttcagagcataaaaaaactccggcgaaccggagaagctactgaacgataaataatactctcgtgccgtcggaatatccgctcatttgatttccaacccatgaaccggctccgcggttatccgacggggttacatatctgatatcagcccccgccccgccttctgtgcagactgccatgggccattcatcacggtcaaacccgggctttgtcggaattcctttcaatgattctttccttctattctccgctccgccccgatcaattgtacaaatctcagaatgacctgccgaaatggcgtcttttatatgatttcccgtctccggatattttgacagcgggaaatacagcacctgatcgtatcgggatgcggcacgagcagcactgtccgaatggatgccggcgcccgtaaggccgaactgaagagagatcaccaaaagcagacttgccgcccatttcataaacgcattcattcacatcctccttaagaagttgatatgaagcgtaaatatgtatattagccggatttaacacacatgatgaaatggcaaaaaaagtttgctgttttgttgataatcaacgaaaatggcggctttacgatttgtctattgaaccggcttctgtttccttatatattttagacatacttatgagccgttgtgatcagtgtcttcggcagataaaaggaggaatgccgtccggtcggcaggcaccggctgtttgttatgtcttttcaaaaacatgaaggcggggaaatccagatggaaaaaacaatgtttcacccacactcacccgagtttcacgaaaacccttttgcggttttaagcagattcagagagcaggaccccatacataaattcgaactgcagcgtttcggaggcacctttccggcttggctcatcacgcgttatgatgattgtatggcgtttttgaaagacggcagaattacgagagatgtaaaacgagtcatgccgaaggagctgatcgcgaagctgaatgtcagtgaagatatcgattttgtctcagagcatatgctggcaaaagaccctccggatcattcacgacttcgatctttggtgcatcaggggttcactccccggatgattgagcagcttcgcaccgggatagagcagatcacagaagagctgctggatgaaatggaaacaaaagcagaccctgatatcatgagagatttcgccgcaccgcttccgtttatcgtcatttccgaactgctcgggattccgaaagaggaccgcgccaaatttcaagtgtggacaaacgcaatggtcgacacgtcagaaagcggacaagatgcgaccaaccaggctctcaaagaatttaaacaatatatgaaaacactgatcgaagaaaaaagaaaacatccgggtgaagacctgacaagcaagcttatttacgctgaagaggacggccaaaagctgagtgaatcagagctgtattccatgctgtttttgttagtcgttgccgggcttgaaacaacggttaaccttctcggctccggcaccctggcgcttcttctgcacaaagaccagatggagaagataaagcggcagccggaaaatatccagacggcggtcgaagagcttttgcgttatacctctcccgtcatcatgatggcaaatcgatgggcgattgaagatttcacctataaagatgtttccattaaaaaaggcgatatgatatttatcggcatcggttcagccaatcgggacccggaatatttcgatgatcctgatacattaaatatagcgagaacaccgaaccgtcatatctcttttggattcggcattcatttttgtctcggggctccgctcgcccggatggaagcatccattgcctttactgcgcttttaaaacggtttccgaatatagagctgaaaggcgcgcccgaggatgtaacatggagaaaaaatgtgtttttgagagggcttgaaacatttcctgtcagattttaacatctccccccctgtttatcgggggtttttttaatgtcttataaacagaaatcaatacgacaatgaaaatttagtacatagtaaatttagttctatatggataaaaaaagcggccggattgctccggccgttctctattaccgttttaccaactcatttgtttcgtccagcttttttctgaaagatttaaggaaatttgcgcttatcgttcctttgtttgcgtacagtttttcgcagaatgctttaatggcgttttgcggctttggttccgacagcattgtgacatgattggaagagtgaacgtccaacaggtgaaactgtttcatctggcgttcccattctttccaatacgcatcatggtctaacggaatttgttcttcctctgctgtcagataacgttcaagatgtccgaggaacaaaccgcttttattacggaagtagtagcattgcagcgcttccggatgaggcagcggcttcatgtcatactcttccattccgtaagcgagctgcgtcttcatcatttgctccagctgcatccggatcgcttcttcggattttggcagaccgcgctttttggcaaggccgatcaattctttcaatacttcttcttcctcagcctggacggtaatgtcttctctgctgattaatgcctcttcaaggttttcaggcttaagatatgctgtaagcatcgtattgatcgtttgcagcatgactgacttaacagatggttttctttctttccatttttcactgtacggggtgtcgatcatgacggcgctttttaccgtatgaccttcctcctgcaagaggcgcgcggtttcatatgcaagcatgccgcccaaggaatatccgccgaggtcataagggcctttcggctgtaccgcttggatgattctcatataagaagcggccgtctcttcgattccttgcagcggctctttccctgtcaaacctcttgcctggatgccgtaaaaaggtcgctgactctttttggcgaatggctggtatgcttccacgcctcccgttccgccgtgaaaccaaaaaacaggacggcctttttctctttcattcagcttgacgagttcgggaaaattccggcccgtctcctgcggttggttcgtttttaacagcatgcagatctcctgaagagtgctgcatttctgaagagcctccagactgatgcggctgtctccgtcctcaagtttcttcaacagctgaatagaggagattgaatcgaagccgtattcagtcagcggcttattttgatcaatttccgctgccttcatccccaaaatgtctgccacaatgtcagccgcgctctcgcagcggatctgaggattctgtgaaaccggtgcaaggctgatgtcttctggctgaccgccgttccaatacttatggttttcaaaaggatatgtcggaagcggcactctttgaacagatttgccttggtggagtctgtcccacggtatatccgcacctttcacccagcaaaatgcaagtttttcgagattgttttcagccaacagcgtctccgtgacgactgtaccgagagtcccttccagtaaaacgccgatatctcctgatccagtctgctgactgcctgtaaagaagcttttcattccattgctttcttcggaaaatgctctgtactctttcagtttttccagcaattcatcttgattgcgggcaacgagtgccaggcggcagttcatcgcctcacggccggtctgaagcgtataagcaatatcccgcaatgacagagtatctccagtttgcacaaaatcagccagctgacttgcgaccgccttaagacgcccttcgctcttagcagaaagcacgataagctgcggttcatgcacagattctttgtctttatggctcgggctgtactgttccaagacgacatgcgcattcatgccgccgaagccatagctgttaattgcggcccggcgcgggatcggtctgcccgtatggtcggtgagctgtgtccattcctgattgtcttcggtgaaacggaagcggcttttctgaatggccatttgctcatttgcagctgtaaatccgggaatacccgggatggtatgatgcttcatggccatcgccacttttataagggcggccagtccggaagcgagttcgccgtgcccgatgcaaggtttcacggtgctgatataacaaggcgcgctttcctcttgatttgcagactcgccgtaacccgctttgattgcattaaactccagcgcatctgccatttcggaggcaatgccgtgcgcttcaatataagtgacagtttgcggatcaacatcggtgtcttcgtacgcttttttcatcgcggccttcattcccgccggattcggtgcgtgaagcgacatgcctttaccgccgtgagacactcctgttcctttaatgaccatgtgaatatgatcgccgtcttcaattgccgcctcaagcggtttgatgatgataacgcccgccccttcgcttctgacaaagccatcggcatctttttggaacgatttcgcccggccgtttttgcttaaatatcccattgagtcaaaaccgataaagcccttcggcgactgcagaatattggcggcgcccacgacagcctgctcacattcgttatgacggattgattgaaccgccctgtgcaatgccaccagggttgacgtgcaggcagcctcgtaatattcactcggtccttgtaaattcaaggcatatgatattctgttcggaatgatggacgggatggctgttccattgttcggatcgctgttgcccgcggcaacgaaaacgcctgtcggtctgcttgataacgccttatttgtcaggcccgcatcctccattgctttccatgtatgcatcaaaagcagaaactgctccggccccatttgtgatgcctctttaggggaaattccgaaaaagagcgggtcaaattcgccgacaccgtcaataaaaccgccccatctgagactcgtgtcattctcatcaccggcgtaacggcgccagtcccagcggtccgccggaatttcggtaatacagtgatccccgtttacgatgtgctcccaaaaagactggatatccggggattgcggaaactgagctgacataccgataatcgcgattccttgcttgacatcggcgttatcacaaggcgtatgctgtttcctcggtaaagtgcgctcttctgtttccgtggccctggcctcttctgaatgcttatgatcggcaagcaattgagaaaacttgctctcatatgctgacgcgaagtggcgggtcagctcctccgcggtcggatactcgaaaaacaatgttggattcacatcgatgtccgcctcttggccgatctcttttgtcagcccgatcaggcttgctgaatcaagtcccaattccatgatattcgcgtcagaacgaagagatggcccgggttcatccatcatcttggcgagcttgccaaggacgtagctgcggatatcatctgtcagactgccggcagaaatcggtgctcccgcattcttaacagccgttcgggccggctgattcatctgttcggttttcggacggaaccgtttcagggcatagccttcaaaacgcatcaccacttccgatcggctgctgatgacatctgcgttaatcagaatcatttcccccgtttgtttggtcagcttgatgtgcagccagcaatcgataagatcttcagggctgctgaaggtgacggaattaatgccgaacggcagatagctttccgcctccgtttgatccaataaagaaagtgaggccaagtaagcactgttggcgatgaacggatttacggcataatgatgcgcttgttgtgagtcgctattgttcaggttcactttcgctaaaacggcatcagagcctttgtacaggcgggtaatcgttttaaattcttctccccacacgacgggtcccgttccgtctccgtataactcatctatccggcccacttcccggtaagagcgctgaatggccgccagatccgcgtgctgcttttgaaacggataggggctgcactcggcatacgccgctatgctccaatcaggagacgtgcggctgcggtgcattatgctcagttcaaatccatccccgttttgtttcgattctgttttcagctcgatgcgatcgcctttttttacggtaatggggctgacgtaattcagttttttaatttgtcctccttccgcttcaggaaaaagatcacaaaaatgatcgactgccagactgttatatgtagcgccgacgagtaccggttctccgctgaattgatgccctttcacgtatggatcgtcatcactgtataccgcctgaacgccggcagcgttttctgattcactgaattgaaaagaagtcccgtggtcaaaagcgtaggccggcagatgaacggcgtgctcttgctgcaactgatcaaacgcgatattctctcctttttcccattgccgcgcacgccggccaatatcagattcagagaaattgagattccgctgatccatgcggtaagcggccagcttttccagcagttcctgaacggaagcagccgtaaatgccgcccgatactccgaatgatgcgttcttttttgcagcgcggatgcgatggcggccggatgaagagatggcgtcttttctaaaaaggccgccagtctgtcaagataggcttcaaaactccattttgttttcgctgacacagggaaaatatattcctcatcgccgtgacgggcctgatcggaattcgggctgatatattcttctacgatgagatttgcatatgccccgcctgccccgaaggaattaatcatgcttctccgcgggatgatgtcccccgtttcggcatccctcatacgctcccaatactcggttttttcctgcaggtgaaaagccgtttgttcaaggttgatattcggattttgcggttttgcgttaatcgtcgggactaatgtttcccgctccatttgcagcagcactttcgcgagctgggacatgccggaagccgcctctaaatgaccgagatttgacttgacggatccaagcgcgcaaaaacgttttttatcagtatattgcgcgaacgcatttgtcagggcaatgacctcaatcggatctcccaatacagagccgtttgccgctgattcaacataactgattgtttccggattgattccggccttgtcgatggaagccgccatgagcttcgcctgctgtttcggatccggagccgtgtacatctgccttccgccgctatggcacaacgcgctgcttttaatgaccccgtaaatatggtctttgtcggcaagcgctttggagagcggcttcaagagcaccgccccgactccttctcccggcatcaggcccgtgccggttccgaagcttttgctttcacttccctgttcaagcaaattcgcccgttcgagcgcatcatatttagacggttcaagcgtgagattgacccctccggcaatcgccatggaacagctgttaagcttcaggctttcacaggcgagatgaatggcgctcagtgagctggagcatgcggtcgtaacgcccatgctcgggcccgttaaattgaaaaagtgggaaatgcggttggcgatatgccaatcccctccgttagagctgagcgcagctttttccaatgacgggatattccagaaatattgattgtacatactgcccataaatacaccgatgccgctgtctgattcctgccattcgtttactctttctaacgagtagcctccgttttcaaatgtttcccatacggtttctaagcttagacggagctcaggcgtcatctccatcacatggtcttcccggatgtcaaacaagtgatggtcaaaagcgtcaatatgctgcagaaatccgccgtaccgtgttttgtgttcttcttttcgtgtttcttttgccatcgttttcagaagaccggacttccatctgttttccggagctttcgtaatacagctgtctccggcttttaaatgctcccacagctcatcgagggtttcagactcgggatagcggccgctgatgccaataatggcaatgtcgtcacgatcagaacgattaacggtgacggtttctgtttccggctttggcgcttttggctctttttgttcagtgataaaccgccgcgtttccgtgacaagcggcaccggttcattcattgcaggttccggatgctttgtttcaggaggcgcttgttcggctccgaatgcctgttgcagcttatccgggtaagtttccagcaaatactcggcaagttctttcgtattcgtgtgttcaaataagaccgttttcggcagctcgcccgtcaatgtttccagttcacggataaaattcacctgcaaaatggagtcgatgccgtatttttcaaagctggtttccggctgaatgcgctcgggagcaagctttatggacttggctaacgtttcttttatgaattgcacagtccggtctgtgactgagaaagacggttctgtgaaatcagcctgctctttggaagccgcagtttcttcaaccgcctgcgcgtccggctgcttttgcctgatgacgccgtcgctttctgccgccacgatctgctggccgaggtgatgtgacgattccgccataaatgtaacgtaccgatatccctcgctttccagcgcagactgccacgcttcaggatacagccccgggcatccgggaatgcgcagtttggcgtcttcatacagccaccagccttccaaaagaccgaatgtcagatgagaataaaccgaatggctgctaatctcatttaataacaaaatcccattctttttaagcaccactttggcattgcgaagtgtccgccgaatattttttgtcgcgtgaagcacatttgccgcaattaccgcgtcatatgcgcccgcctctataccctgcaaagccgggggctcttccacattaaaccgcttataagtcaaatacggattgtcgggaccgtattctttttcagcatgcatgaaaaaggcctttgacagatcggtgtagcaatattctttcacatgatgtttgtactcttttaatcttttgaaaacggccgcgctcgtcccgcccgtccccgctccgatctctaatatccggatttccgcgttcgggtcttctttcaggcgttcttcaatgaaagccgtcaatgtgtcagcgagcacctcattaaagtagtctgccgtttcattgtttttatagattccttccaccaattccattgaggaatcaggaaacagaacatcagtggcagaaactctgccggataaaatatccggcaaagctctgagagcggtctccactaaggtgatcatcgcctgtttgctgctgtccttgagtaaaggagctttcttttcatcccattcttgccacagaacgtccgcacgctctatcggacctgttaacacatacgtactgcctgactgtttcaaaaagcctttttgcaccaagatggagatgctttcttccagccacctgccgtaaaacccctgcatgacaggctgcgtttcgttttccgtgaaaaatccgacagatttcagctggcctgccaatagtttgtaaagaagatcttcagtgttttgcaaagccgtcccctccttaactcaattgttgtacatgtcttgttactttaggctgatagcttcgcagtttttgcatcgccgagccgtgatgttcagggtatacttctatcatttcttccggtttttcctccggctcttccgcctgtttcatcatgacgaactgattcaacgggccgccgagcaatcgttcaagcgccgccattgcttccggcgcttcaattgatccgactcccgcctgtttcatccgttcttgatagtcggcagatgatacgattccgacactgccccagtagctccaattcatcactgccgccgaatacggccgaacttgagccaaatgagcggcaaaggcatctttgaaactgcatccggcagcataattgctttgtccggccgctcgtgcaaatgattgaacagatgagaagaacaaagcaaagtccagcggctcattttggaacacgcgggccatattcacgctgacattgactttcgcagcgagcacgcttttcaaacggctttccggcatatttgccaggctctgatcctctaaaacaattgcggaatggataattccgttaatttgcgggtgcgtgcgtttgatcgtttcatacgcccgtgtgagctcattcggatttgccgcgtcagcttcaatataaatcggcgccgggccgaattggctgagtctgtcgattttttcctggatggcgctgttatgttttcgtctgccgatccaaacgactcgcgcctgatacgttttcacggcatattcgctccatgcctcgccgatgccccccgcaccgccgatgacgacataaacgccgcctttttggtaggcgggccggcttgacaccggctgctgtacaggaatgaggcgctgtttgtaccagtgattgttccggtacgcccatgtattgccttgctcatcaaacggcgctgagaacagctccgcctttgaaacgtcttccggacagccggcatcaatcagccttgtttgccagttcggatattcttttgcgagcgagccgaccaaaccgtgaatgcctgcatgagccggatcaataatgtccgccggctgtacggactgtgtttttattgtgactgcagtcaagctgattcgcttgcctccatattctaaagcaagcatggccttaatcactctgtacatctggatgacgcccgcatcctgagcttttaccatgtcatcagcgctgtgaaaaggagcgatccatacgatatgcccgaaagaccctgttgctttcagttcagccgcaacagcctctatttcatcctccggggtgatatgaagccgtttcgcagaaggatgatgcaattgaaaagccgcgctttcctcatcccccgcgataaagacaacctcttccgtcttatatgccgggctttgatcacggaattccgcgagatcccacaccggagccagaaggtttgctccatttaatgatgtttccggcgcggggccttccatcattctggaagaaatccctttaattctgacacagacccggcctgtctcatcgcataagtcaatgtccatacgctgtattttttcatccgttccccgggagctgacatacgcccacatgcttgtcgtgcacgggctgaaaatgtccagttcttcaagggcgaacggcagtgacagctggttatcatctgcgtgcagcttcagaccgattgtcgcttgtaaagctgaatcaagcatacacgggtgaagaacgtattgatctgccgtttcttcgaggaaggaaggcagccggagctcagccaatgcttgattgcttccgatatgaatctgctgaattccttgttgtccgggaccgtagtcaatgccgattttgctgaataagccgtaacactgttcagaagtcagtatactgaggccgcattgagctttcagtgcgcctatatcacggtgcggagcctccccggcgctgagaatgccggcagccccctgacagtgtatctgcctgccgcttgcttctgtttgtgaatccgtgtaaacgtcatacacgatttcaccgttttccctcgggttcaggctgatttgcgcttcaatcgggcggtttcccgcttcgatcggccgaacccaaacgatgtttttcaggcgggtgacagatggacgttccttttgccctttgactgcctgagcaaccgccgccctagccatttccaagtaggcaacgcccggcataaccggcttgcccttaataagatgatcggtgaaaatcgtctcttgtcccgtaaattcggatcggtaccgctgctctgttaaatctgatacattttcgtgaagcagcgggtgcagcacccgcgacgtcggcacagcttgcggtttctctgctttcggccgattgtccgtgatccagtaccgctctttcgcaaacgggtaagcaggaagactcatccgttgaggcttgatatcagaatataggccgtcccatttgatatccgcgccctgcacccataattccgcaagcttgtcattctctcggcggcttatcagctcttcgatatccgcctcgccgtttgcacctgccagaatggatttcagggaggttttacccgcttttcctttataaatgcccgctatatcataacgtcctttcgcacagctctttagcttgtcccgcagttcttcggccgaggaagcgataatggccgctctttcttccatggcatcacgcccctgctgaagcgtgtaagcaacatcggcaagatccgcatccgtaaaagaagcttgcgccagctgctgcgcctgttcctgcagacgttcttcttctttggccgacagcacaaagatttgagggtgtgtgaaaacagctgtttttctttcttccttcgggatatattcttcaatgacgacatgggcgtttacgccgccgatgccgaaagaactgattcccgcacggcgcggcagatgattgccgttttcgtctttcaatgccgtccattctcttttttcctgtacgatgtaaaacggactgtctttcagcttgatatacgggttgatgacctcgctgtggaggctttttgcaagtgttttatgcttcatctgcatcagcactttgatcacacccgcgacaccggctgccagtgacaggtggccgatattggttttggccgaacccagaccgcagtgactcgcgtaaacggcggaatcgcctgttttttcgtacagcttttgaaaggcggatttcaggccgttgatttcgaccggatcgccaagctccgttccggttccgtgcgcttctatataagtgacggttctcggatcaatgccggctttgtcataagccgttctgacgacttccgcctgggctttcgggttcggtgtcgtcaaggagttcgcgcgtccgccgtggttgaccgcgctgcctttaatgacgccgtaaatatgatcgcccgctttttccgcttctgacagctttttcaaaaacagaattccggcaccttcactgacggcaaatccgtccgccctgtcggagaatgttttacatttcccttctttgctcagcgcccccgctttgtcataagcgatgtggccttgcggagtgacgacggtattcacgccgccggcgatcgccatatcgcagttcccgttttcaatggcgcatacggcgtgatgaatcgcgaccagcgagctggaacaagccgtgtcgatcggttcactcggcccgtgcagattaagcatatagctgacgcggttcggtcccgctgacggactcatatttgcggctgacgcaccgccgatatccaggtcggaaaacagtgagccgtatccggtattccccgtgccgatatacaggcctgttttcgtgccggaaaggcttttagcggaatatcccgcatcttctatcgccttccacgcatacatcattaacaagcgctgctggggatccatctgttcggcttccagcggtgaaattccgaagaacagcggatcaaaatccgcaactccgtcaataaatccgccccactttacatttgttttattggcttcattaagcgggtcaccgtaatactcacgccagtcccagcgatccgccggcacctctgttatacagtcttttccctcttctaagttgcgccaatactcatcaatatttgcggccttcggaaacactccgctcatgccgacaatggcgatcggttccggtttatgttcagccgccgtctgaacaggctgtacggcagtttttgcaaatcgtttgttccctgccagtctgataccgccatcatcagttacgctgctttgtttttcttctttcggctgtgtgctgccggcaaattgtgtttgatagtcttctgctaaatgatgcgccaaggcttgaatcgtcgcatattcaaaaaatacggtcggtgtcagatcaagctggtaagtgtcattcagcttgttggcgaattccgtcagcgtaatggaatcaaatccgtattgattgaactccaattcgatatcgatttcttcaatgtttattttcagaagcccggaaacctcttttgccagcaattcctgaagttttgccgtcaggtctttcggcgcaggcgtttcatccgttttcttaaccggtgcaaaagcggccgcaggagtcttttgaagcagcttttcccgcattacggcgcggtttccttccatgacgagcacgcttgttttccccgtgctccatgctttgtaaagagcttctattccggtctcagtgcgcatcggcgttacgccggttcttttttcggtgagcttcgccatttcttcattgacttgcattccgccgtttttccaaagcggccaattgaccgacaatgtgtgaccgtggcggtacattgcggtaaccagcgcgttgcggtatgccgcatagctgtccataaatgcgtttgccgccgcataatccgcctgtcccgcattcccggtgacgccggaaatggatgagaaaacgatgaaaaagtccagcgctaaatgctcggttgcttcatcaaggttgacaaatccgtccgttttaggagccaatacactgtaaaactcttcggttgttttctttgcgatatactgatctttcatcacacccgcgctatgaatgatgccgtgaaggccgccatattccgtctcaattgttttgaccaggtctgccgcagtttgagcgtttgttacgtcagcctgcttgtattccgcttttgctccgagtgattcaagcgattgcagctgcatccgctgattctcgcttaatgcggaacggcctgtcaaaaccagtgtcggctctttgactttgcgggcgatttctttcgcgaaaataaagcctaagcccccggctcctccggtaatgagatatatgcctccgtcgttccacggaatgcgtattttgccgccggacacggccgtttctttgacatctgcgctgtatcggatgccgttttcatatttgatatggctgtcatcagcccgtgttttattttctctgatgatgtctgtgattctgccgttttccgccggttctatttcaatcagctgggttttcagttttttatgttccaggccggctgtttttaacaaagctgaaatgcctgagagcagctgatgcttatctgttttagagagaaccgtctggatgaggacgtctccatccgtctcttccttcagcagtttttgcagcgtctccaatatccgtcctgtataatcacggaagcgcgccgccgctttcccgtgctgggaggtcatttcaatacatgcagctcccgcggcttcaacggcttgtttcaatccggcctctgtgtcacaaagcaacacgatatgccgggcaaaaaccggttccgtttgaacggcggtttcatcacttcgggtccataccggctcaagcatgagcgtttccggagctttttcttttttctcaggttctttttcagccgttctgaatgacaaacctttcagccttacgcaaaccttgccgttttcatcacaaatatcaagatcgcgtttttcaatctggccggctttgtggtcttcagaaagtctggcgtaaacccacatctcggcagcgcatgcgctgaatacttcaagctcctgaaccgcaaacggaagcatcagtttttcatcatttgttccggttaatatgcttgatgcctgcaatgcagagtccattaagcccggatgcatgacatactcctgtaccgtgtccgcacaagccgcatcaagtgacagtctgcccaatacgaaatcatcacctgtataaatcgctttgacaccccggaaagccgggccgtaatcaaaaccgattttgcggtacatatcgtacacttcatctgcagaaaacggtgtctcggcggattgtgatctcagcttttggagatcaatgaccggagcctcggcgtcagggcggactgatactgccccttggctgtaaacggacggctgatctgtttcccggccgctgtaaatgtcgaattgaacgtcatttgccgtttcaggaatgagacggatgttgacatgaaccggctcgtcttcaatggtgatcggccgcacccaaaccgtattcttaagcttgacgcttccttgtccggccggaacttcagatgcctgttccattgctgcgcgcgccatttcaagatgtgccactcccggtaaaatcggtacgccttttacaacatggtccgcaaggtaaaattcttttcctgtatagattgaactgaaccgctgttctgcaaggtttgaagtatttctgtgcagaagcggatgaagcgcgtcttgttttccggcagatacagtgcttgttttttcgtgttttccggtgctttttgccgcccaatagcggtcttttgcaaaaggatacgatggcaggctcatgcgtttaggccgacggtctccatacagcttcgcccaatcgacgttcagccctttgacccataattcaagcagcttcgcgtatttgccgcgtgccatccatttttcaacggcttcttgaatttcttcatcttccgtcagcatttgcagcgtgcctttgtctattcttcctctgtacaagtccgcgtgcttatctccagtgataaactgtgacagtttttcctgcagttcttctgcagatccggcaataaccgccaggcgttcttccatggcgtcccttccgatttggagggtatatgccatagaaacgagggaggattgatcgtaccgtttttcagtaagcgcacgtttcagctgttttgcctgctctttcaggcgtttttcatttttggcggacagaacgaaaagacatgggtcgatatgagaatcatctgcttcctctctgtcttctggaatgtattcttcgatgacgacgtgggcatttacgcctccgatgccgaatgagctgatgcccgcgcggcgaggctgttcgtttccgcgttcgtccgtctgcgtcttccattccattgtctcccgcaccagataaaacgggctgtcttcaagctgaatgtacggatttaccgtctcacagtggagactttttactagtgtccgatgcttcatctgcagcaaaattttaataatgcccgctgctcccgcggcaagggataaatggccgatattcgttttgaccgaccctaagccgcaatagccggccgctttctcttttccgtctgcaaacgagctgaacgcttgtttcagtccgttaacttcaacgggatctcccagttctgttccggtgccgtgcgcttcgatataagagactgttttcggatcaatgcccgcttttttgtatgcggctttaatgacttccgcctgttgtttcgggttaggcgttgttaaagatgccgcgcggccgccgtgattcaccgcgcttcctttaatgacgccgtaaatatggtccccatccgcctcagcggctttcagctttttgaggaaaaagagaccggctccttcaccatgggcaaaaccgtcagcctgatcagagaacgttttgcatcttccttctttactcagcgcgcccgctttgtcaaaactgatatacacgtccggaagcacaatcgtattgattcctcccgccaaagccatctcgcacgtcccttcttcaattgaagaaacggcatggtgtatggcaacgagcgagcttgagcaggcggtatcaatcggttcgctcggcccgtgcagattgagcgtatagctgacacggttcggtccgacagacggacttgtattcgctgcggatgacccttcaatctccgcatcggcattggctaaaagagaaccgtagccggtatttccggtcccgataaacacacctgtctttgtgcctgagagactctttgacgcatatccggcatcttcgatcgctttccacgcgtacgtcagcaagagacgctgctgagggtccatttgctccgcttcccggggtgaaatcccgaaaaataatggatcaaattcagcaattccgtcaataaacccgccttggttgacgtttgttttattggcttcttttgcgggatccccgtaatagtcccgccagtcccagcggtctttcggaatctcggtcatgcagtctttgccttctttcaggttctgccagaaagcttcaatgtcttctgccatcgggaaaatcccgctgatgcctacgattgcgatcggttccggcccttggccccgctgcactgtctgcggaagtgtctcaggcagagtgcggcgtcgcttaacggcagggcgcgtgatttgagtctcttttaccggtcttgccgattgaaccgtttttgtatttaccgcaaaccgtccggcaaattcctcttcgtattcactgattaaatgaacggcaaattcatggattgtcggatgatcaaagaaaatcgtcggcgttaacgtaagccggtacgttttgtttaactggttcgtaaactcagtcatcgagatagaatccagcccgtattttgtcatttcttcatgaggatcaattttgtcaatgtttacttttaacagtgaggccgtctgctgttttaacagatgcttcactttttcaagcaggctgtcagcatcaatgtcatgacgtacgccggtctctgcttccggatgatcattctctttgcggaacagttttgctttcatgtgtttcacatctccttcaacaaccgtcatccgggctgtcccgctcatcaagccttgatataaagccttgatgccggcatctgtgccgagcggtgcgattcccgcctcctgcatcagcatatcttccgtctgctttcctgcctgcattccgccttctttccataacggccagctgacagaaagcgtctttccgtatctttgtcctgcggcttgtaaagaacggcggtactcggcatacatctccataaagacatttgcagacgcataatcagcctggccgacgcttccaagcacacctgataaggatgaaaagacaataaagacatctaatttctcatgttgtgacgcttcatcaagatacacaaggcccttcactttcggagcgagaacgtgttggtattcctctgccgtcttcttcaccatgtagttgtcttttataatgccggcactgtgaacaatcccgtccagcttgccatgccgtttgcggatattgcggatcaatcggtatacttctgcttcgtccgtgacatcggtctgctcatagaaaacagaagcgccggcagcacgtactgtttccagcatgtctttctgcttttctctgagaacggatcggccggttagtatgatgacggcgtcttttgtacggtttgcgatctcttttgcaaagatcagacctaaacctccggcacctcctgtaatgagataaacaccttcgtctttccacggaatgtccggctccgcttgagaaatatccatctctccccaatcagcggcaaagcgcttgccgttttcatatttcacatggacgctttcggcatgcatacggttttcggacactttttccgctatgccttcagcactttctttctcttcggcttcgatcatttgacagatcagcttggaatgttcaaggcatgcggtttttaagaggccggtaatgcctgagaacacctgctgtaagcctgctgaccgcgtaacagcctgaaaaagaacgctgcccttcggcttgcttttcattatggttttgatatggtcaaacagctggcccgcataagaatgataccgctctgcaatggatgcgggacgatcgtccaagataatgacgcttgcatgttcaagctttgcttcgacagcttgttttacggcttcatcgtactcacaaaggaaaataatatgctcttcatacgaagggtcgtgatcggccggttccggctgctctttccagaccggttcagcgagcaatgtgtccgtacggctgaccgaaacgccggcacccgcgttttcttccatgatccgtgttgagaaacctctcatccgcacacaaagcccgccgttattgtcatataaatcaatatcggctttttggatagaatcgccggctttattgttcgcactgaatgtgacgtgcacccacatatcatcagcgcacggattcagaacgtccagctcttctaaagcaaacggcaatgcggctttgaatggttccccgctttctgcaagcagcgctctcgtcacgttttgcaaatattcggcggcctgaagcgcaccgtccatcatactcggatgaaggatataatcagcttttgtatgagagacggattcaggaagcttcaatttagcaagcagccggtcttcgcctttgtatacaagctgcacccctttgtaacccggcccgtaatcagcaccgatcattcctttgtaaaacgcttgagattcgattgttccctgtgtgcaccggcgcttcagctgctcaatatccgccgcttcctccggttccttccggatgatttcagcgatgccctgattataaagaggagcttcttcaccgatagaatcgttatccccgtacattctgtattgaatctgtccgtcctcttcttcataaagtccgatatggacacggacagcctcctgatcggctatcaccggacggacccatacaatattctttaagcgcaggcccagagattcctctgttgccccgccgatgcttttctccgccgcggcccgtgccatctcaagggtaacggcagccggcacgatcgccattcctttaatgatatgctcagcaataaaatactcttttcccgtgaattccgaactgaaccgctgctcctgcaagacggatgtattctgatgtaccagcggatgcaaaagtttggtatccgtttgcttcaccgtttcctccggccagaagcgctcctctgcgaacgggtaggtcggcgcactgattctttgcggcgcggaatccggatacaataagccccaatcgacacgcgctccttcaacccagagcgccgcgagtgctttcagcttttcatcccgtgtctgacatgccgcaagctcttccatctcctgagctgacacttctctgcttctcactttttcgccccgtaagatgttttggtcattgccgttgatgaaatcctgcagctgacgattcaaatcgtgacgatcatgactgataaaaacggctctctcttccatcgcttcacgtccggtctgatacgtaaatgccagatcatgcaaggaaacatcgttttcggcttcatccagaaagccggataaacaagatgcataggcagtaagacgctgcttatttctcgctgacagcggaacgatataaggcggctgtccgtcatttgatccgctgatcgttttgttttcatactgttcaaaaatggcgtgtgcgtttgttcctccgagtccgaatgagcttaacgctgcgcggtgcggcgtctctctctccggcagcggttttctcttatccgccacataaaacggcgaaccgctgaatttgatattcggattcggtgacgtgtaattaatggtaggcgccagctcccgatgatataaactcatggcgactttgacgcacccggccagacctgctgctgtatccaaatgtccgatattcgtttttacggagccgatcccgcaatactgctcccggtccgtgtaacgtttatacacttgctgcagcgcggacatttcaatcggatcacccaatgtcgttcctgtgccgtgcgcttcgatataggaaatcgtctccgggtgaatattcgtgctgtctaaaacatgctggatgacgtcagtctgaccttttacactcggtgcgtaaaaaccgactttatccgctccgtcattgttcagaccgatgcctctgagcatggcgtatatgtgatctccgtcctgaacggcttgtgacgcctttttcagcagaatgacggccgctccttctccgcccgccataccgtcggctgaagcgtcaaatgctttgacatgcccgtcgcttgaaaaattcaatccgttttggtgcacatagccgatgctggtcgctgcatgcagagttgctccgccgacgagcgcgtattccgattctccgctcgttatgcttttgtaggctgaataaagaccgactaatgatgatgagcaattggaatgaacgaaatagcttggcccttttaatccgagcttatgggaaaccatcgtcggaattgtaccgctctgcgctaacacccatgacacatagccgtcgggagattcatggccttctgtcgttttttccggcaaaagcgaccgatacgaattattgcttgccgacatatatacgcttgtcttcggaatctctttcgatacatatcccgcgtcctcgacggctttccaagaatgaagcagcagaagccgaagctgaggatccataaattctgcgtctttcggagaaatgtgaaagaactcagggtcaaagagatcttttccttctatcgtcgataatgccggcacatagtcgggattttcgatcaaatcttcaggcacgccggcttcccgaagttcttcttccgagtagaaccggacgctttcctttccttctcttaactgcttccaaaactcatgatgatttttcgcgccggggaactggcaggagatccccactatcgccacactgtcatcaaagtaagacggcaccccgttttgcggtgtttgttctctttctctctcatcttggcaggacgcctctgattcagccgcctgttttgtttcaacaataaatcggctgatcgcctgaatggtagagtgttcgaataaatccgtgacggtaaaatcgcattcaagctcctgtttaatgcgttctgccgccgcaacagccagaagcgagtcgcctcccacatcgaaaaagccgtcttcgattttgatgcccgccgtattcagcaggtcttcccatattgcggtcactttcgcttccgcttctgataacggcagtctgcccgtcttttcagaccggtgaacgattaccttgcgctgttttaggtctttgcggttcacttttccgctcggtgttaacggcagcgcatccagacggataaaatgggcaggcgccatataatccggcagactcgataaaagatggttgcggagcgctttttcgtctgccgtatgaccggagcgggccgtataataagcaatcagctttttatgtccgttcttttcctgaaccacaaccgcctgatcaagaatgtccggatgttcgctcaatttcgtttcaatcgctcccaattcgatgcggaagccgcgaattttcacctgactgtcaatccggccggcatattctatatttccgtcaggcagccatctggccaaatcacctgtcttgtaaagtttttctccttcactaaacggattatcaataaatgatgccgccgtcagctcaggctgattgtaatagcctctggccagaccggcgccggccacgcaaagctccccggccacaccgtcagggacggggctgagcttttcatcgacgatataaagccgcgtattgtgaatcggtttcccgatcggcgtattcctgcttgtgatttccttttggccgcagctgtagtaagcggcataaatggatgtttccgtcgggccgtatatattttcaattctggcatgtttgaagatggaaactgactttttaactaaatctttcggaaacgcctcaccggccaccatcacatatttcacagggccgtcttctgtaaatgccgtatgccgctttaccgtttccagaaatacattaaacacggcgggcgcaaaattcagatgcgtgacctggtgggtttggatatattccatgcaaagctgcggatttttttctgcaccaggcggcaaaatgacaagccgtccgtttccgataaaccagccgaataattcagaaatcgaaacgtcaaatacgtaattcgtttttaacaaataggcatcctcttgtgcgaccggatactcagcttccaaaaactgcagcgtattcataatggctctgtgctcaaccatgacgcctttcggttttcccgtgcttccggacgtatatagaatataagcgagatgatgcggttttgaacgcggcgtcagttttgccccgctgacagaacgtccgctgttttcaatttccaccgtgctcacaccgccgatggccaactgttcaatcatgccgcgcgtcttttcctgtgttaatacgattgacacgccgctgtcagtcaacacgtgggccatccgttcgtttggaaaagccgggtccagcggtacatacgcgcctcccgcttttaaaatggcgaggatgccgatgaccatctcaaaagaacgcttcgtacaaatgccgaccgggcattccggtgtgacgcccttttcttgcaggtacacagcgagcgccgtgcttcgttcatctaattcgcgatatgtaagactgttttcaccgaatgtgacggcttctctgtcagggtggcgtccggctttttccgcaaacacttcatgaatgcagcgctcattcggctgatgggatgaacggctttcatcccgtttttgattgagcaggccggaacaggcttcaaaagcgatctccggatcagaaagcaccttttctgccagtttcatataatgctccgccattcgttcgatgaaagaagggctgtagacatccgggttgtacagaaattgcaggacggttcccgtttcttttttatagacttcaagcgcaagctcaaattcgccttcctgatgaatgtcttctatcatttcaatgccgagtgattgatatagttccgccagcttttccgctccttctgtccggaagaagttttgatagaaaaacgcggtttgaaaaacaggcgaaaccgcaggcgagcgttccgtcttcaattctttgacaagtgcgggaaacggatacgcggcatggtccagcccttctgccagtgtcagctgcagctccttcaaaaacgccgtaaaagatttggcgcccgtctccctgctcctgaccgcgatcatattaataaagtatccgatgacagactcaaattgagcctcagaacgccccatcgtcggcatgccgacgatgacatcttcctgattcgtatattgataaagcagtcctttgaaaatagcgagatacacaacggattcattgacattatgtttttgggcgcaaactttaatctgccggttcagttcatcaggaagcaagcgctgatacgcctgccctttgcacgtttgaaccgatgatctcggataatccgacggaagctcaagcaccggcagcggtccttccagctgctttttccaataagagagatgcgcttttcccgcttcgctttccagcagctctttttcccatttcacaaagtcatgataatctgcggcctgctgaagcatgacaggttctttgccttcgcttgcttttacataagcgtccagcagcgccgacataaacgtcataagagagacgccgtcaaaaatgatatggtgaatggtgattaacacaatcggctcccgcttcgcccgccggaatacttgaacacgcaggagcggcccggtttcaagcgagaacggttcttttgctttttctttaataaacgtaagcgcatcacgcccgcttaattcagaaagatccatttcttcaatcggaaaatgccgatccgtatcttctatctgatacggaaggccgttttcctcttttatcacactggtcaaaatagggtgctggcgctgcacggacaaaagggcgtttttgaatgtctcgatatccagcttttgaaaacgaaagcataacggaatgttatatgcgctcatctccggaaacattttctgaagcatccacaaacctttctggccttcagaaagcggacgttttgcagttgtccgcttgaaagcctgaagcttttgttctacttcagcgatggtgagcgttcctgatctgtaggcatcgagaagttctttatgattcataggtcttactcccttctatgatgtcttgcactcttttaaaatctaatgtcccctcagagacctgtttcatcatggcgatgatctcctgatccgtatactccttgttatccggagcggcggcttctgtttcggtttcttccgttctgtaaaacgtttcgatcgtttctttgtgttctgtcaagtaatagctgatgacgtctccgagcgtggcatagctgtaaaataacgccggagtgacttcaatgccgtaatgactcgtcaaaagagcggcaaatttggctaaatagatggaatcaaatccgaattccgcccagtttttatgcaggacgagtttatctttcgatattttcagcagactgtgtatcagctctttcaaatccgcttcgagccgtttttctgcgctttcttccgggatgcggcggctcacggtttccaaaagcgcatccggttttgatgaatcgtcccgccgtatgcctaaaaatcgttcggcacggcttctttcgccggcaatgacaaggcactgggtgttgtcttgagaaatgacgcgctcaaatagctcaatgccttcatctgtttctaacaggcgctggccgcttgatttcaggtacatgcccgtcgtctcttcaccgccgacggccattccgccgtttttccagaccggccagttgatgacaaaagcgtttccgctttctgattgttcgtttttatagttggcatacgccatttggaacctgttcgcgaccgcataatcacagcagccgaaatctcctaaaacagccgatgtggatgaaaagtagcagatgaaatcaggcgtttcgtttttcagccactcgtcaagaagcaggcttccgtttattttcggttcaagcgtactgcggaaattcccgatttcattttcaaagacggatgttctgctttcgatgccggccgcatgaatgacgccgtgaatggctccgaatcgttctttcgcgcgcttgatgcagtcgcccattccgatcggatcacaaacatcggcttcggcgtaaagaacacctgcgccgagattttccaggtctttcattttttctttcttttcttcattgatcggcgaccgccccgtgagaatgacatttgcctggtagttccgggcgagatggcgggcaaataagtagccgagccctcctaatccgcctgtaatgagatatgttccgccggttctgatcctgccgttttctttcgttagtccggttggttcggtgtgatagacatatcgttttccctcttccaagaaaacggtatggtctgtttcagctttcagctcgtcccaaatggttctcatccagtccgttatggccgctccggcttttctgaagtggccggtaacacttgttttcgggagaacaatgccgagcgaacgctcaaagccgatccatgattccaagtagcacctttccagaccggatgcatattcccccgccaataacagcctttccggctgcagaccggtctcagccattgctttgagaatatggacgatacatgaataatcttcgatgcagcttttatcttcaagcgcccataaatacaaaatggcagaagcttcaccgtactctttttgaatatccgcaaaagcgttcacatatgattgcggatcttcccgcaccacttggcagcggccggcggacagagcctcataccggtctccctgagcgataaaaataacgtcaatgccactgtcatacgatttgatcacagagacggcttcctgctgcttcttctgatcagataagaaagaaatcaccgttttgacttgcttttctccggcagccggcagagcctgttctttaagaacttctctaaaagccatcacttcaaactgttccgccggatcactttcatcagccggcgccttaacgggcgcagccttgctttgtacaggctgctgatgccagaagcgttctttcgcaaacggataagcaggcaggctgatgcgggccggaggacggtctccgtataatttcgcccaatcgatgtccaatccttttacccaaagctcaagcagcttagaatatttccgtttgctgatccaagcgtctatgattgtttccagatcatcatccgccgaaaatacggcaagcatccgtttgttttcttccgtgccgtcacggtgcagtccggcgctgttttgtccggcgataaatccattcagtttttcctcaagttcatgaagtgaatggacgataaaaccgagacgctcttccatcggcacccggcccgtctgaagagtaaaggctatgctcataaggtcgctgccgctgtatcttttttcacggatggcgtctctgagctgttttgctttttcagtgagccgttcgctgtttttcgcggacaggacgatgatggcgggctgatctgccggcgtctcatcaggttctttgtctgccgtatattcttctatgacgaggtgggcgtttgctcctcccgcgccgaagctgcttaaccccgcccttctcggaagctctttgccgccgatgacgggacgtttccactcaccgagctcctgctgaacggcaaacggcgtatacgcgaaatcaatattcggattcagctgttccgcgtgcagggacggcgcaatttggcggtctttgagctggaatagtatttttgtcagacccgcaatgcccgcggcgctttcacaatgaccgatatttgattttgcggagccgatggcgcaaaactgtttatctgttgtatcctcttcaaatgctttcgttaatccggcgatttcaatcggatctcctaatgcggtccccgtaccgtgggcttcaatataactgacggtgcgcgccgggacgtttgccctttcgaaagcttcttttattaaggcggcctgcgcattcggattcggaacggtgtatccgttcgttttgcctccgctgttaatggtgcttcctttaatcacaccgtaaatgtgatcgttatcggcaatcgcccggtccaacggctttaatacgaccgctcctaccccttctccgtcgacaaaaccatccgcgcggtctccgaacgatttgcacgtgtcgcctgcggaaagcatgttcatgactgacagattcatataatggatcgggtcggtcactatgtttacgcccccggcaatcgcacattcgcttgaaccgctgtatatgctctcaagcgccagatgaatggccgtcaaagaagaggagcaggctgtatcaacggcaatgctcggcccttggaaatcaaaaaggtaagataccctgttggcaatggaccaatagccgtagcctgtcgggtagtttttgttcatcgcgccggcaaaaacaccgatttttctgctttggcacaggttgtcaggcgtatagccggcatcctcgatactcgcatacgccgtttctaaaaataatcgctcctgcgggtccattcgctccgcttccaaaggagaaatctgaaagaacagcggatcaaacttgtccatatcctcaatgaagccgccccatttcgtataaatagagccttctttacctttctcttcatcgtagtaatcctgccagttccagcgttcccgcgggatttcttctatgcagttttttccttttttaatattagcccaaagctcagccgctgtttttgcctgcgggtagcgtcctgaaacaccgatgatggccacgtcgcgaaccgaactttgccggacggtctctttggctgcccgtttttccctccgccgccagtcagtgcgaagcggcttagcaggctgtacagcctgcggttctggtgatgccttccgttcttcctgaacaggcgtttgtcccgtcagtttgatcatcgcgtcttttttcgttttgattaagtgagcgacgagcgcctcaatcgtctgatattcaaaaaataaagtgctgctgacttggtccaatacatttcgtaacgcgtttgtcagctgtacgacgacgatagaatcaattccgtatttttcaagcggcgctttcggatcaatttgagccggcggaatttttaatgtttctccgattaacgttttcaagtactcggtgcttttttctgttaaagacgtgtcgcctttttgcaccgttgtttgcgcctgaagttccggcgcatgtactgcttttggcggagaggtccgttttccggcccctgatttaagcgttttttggcgaacaatgccgttgctttttgccgctataatctgatggcttaattcatgtgccgcttctgccgggaagaagacagaatgccagccttcactttctaacacgcgcttccagctttccggatacaagcccgggcaccccggaatacgaagggcagaatcttcatgcagccaccagccttcaagtagtccgaaagtaatatgcgggaacaggctgtttcccgccatttcatttaagagcagcaaaccgttgtcttttaaaacggctttggcgtttctcagcgtctggcggatgtctttcgtcgcgtggagcacattggccgcaacgacgatgtcgtatgcgcccggctctatgtcctggccggcaagcggcgcttctgcgttaaaaagcttatacgtcagataaggattccgtttgccgtattccgtctccgcatgcacgagaaaagctttcgatacatcggtgtaacagtattcttttatatggttttgatacggcctaagcttttcaaatatgcctgcgcttgtgccgcctgtgcccgctccgatttccagtatgcggatctcggcttttgaatgtttgctgatgttttctttcacataagccgttaatgtatctgacagggcgctgttaaagtaatccgcgacttgattgtgcttataaattccttcaacaagttccattgaagagtgcgggaacatgatatctgtcgccggcacgtcttcgcgcagaatgtccggcagtgctttaagcatcgtctcggctaaaacagtcatcgcttttgtatcggcgttattgagccattcctctttttcccgctcccatttttgccatagcgcggcggttgtgttttcggctcgcgccgacagtttatatgaatccgcattcccttccagatagccatgttccagaaggaaagcgatcgtttgattgagccattttttaaagtattcatgttcgggctcatacgctttaaggctttgcggcgtcagcaagtctgcttctttaagctgggcgatcaacagctgatacagaaaatcatcaagctcctgatgttcagcctctctaacaagacgtgcgccgggcggagcgaccttcggctgttgtgaaaagacaagcggctgaggcggataaacggaaatcttttctctttcattcatcccttcgactgcgaccggttttgtcgtatgaatgaaagccgcctgatcaaccggcagcgtcataagggtttcaagcgcctccattgcagcgtccggttcgattaatcccaatccgatctgatccatcagctgaataaaatccccgtcttcagccgcttcgctattgccccaatagccccaattcatcactttgaccggacaattccatgtctgatcaagttctttcgcaaatgcgtcactgaaagcgcatcccgcggcataatggctttgtttcacgttatgaataaatgccacaagcgaggagaagaagagcgcaaagtcaagcggctcccgtccaaatacctccgccatggacacacttacatcggcttttgcccgcagcaccgatttgaactcttctgtcttcatattatttaagctttgctcagacagatccattgccgagtggatgattccgtttatttttgtgtggtgctcttttatgaactgataagccctctctaaggaagcactgtcggcggcatcggcggaaacatattcaggcgccgggccgaatgcgctgagccggtcgagtttcgcctgtatggaatcattcagtgtgcttcttccgatccaaatgatgcgtgctttgtagcggcggatcatgtattcactccatgcctcgccaagataccccgcgcctccgatcacggcataaaccccgcctgtttggtacagcgtgccgtttttcggcatattgtcaagcggtatcagttgccgctcaaacagttgctgattgcggtacgcccaaatttgaccgtttttcccggcagaaagactgagcgcctcttcgatcggccagctgccgtccgtttctgtgtcaatcatgcggatatgccagtgcggatattctttcgccattgttccggcaagtccgctgactgcggcttgtgacgggtcggcgctgtcttgatccgaaaacggctgggcatttgctgtgacgatgcaccagtccaaacgtttttctccgtaccctaaggcaagtaatgctttcatcagcttgaacacatgaagaacgtttctttcctgttctttgaggctgtccgcactctcagcctgcggagcaagccaaatgatttgctccagttctttttgtccttcaagcatgtgcgtaagagatgtgatatcatccgtacctctgatcggataataggaagcgttcggcaggtgttcttttatgcgcgtatgtctcgaatccgttccgccgaatactgccgtctgcttatccaccgctgcttccccggctttttcaagcgcaacaggctcccaagccggaatcagcattgtatggccgacaggcgcctccgaggtttctccgcccgctgtttggcctgtgtcaagcgcccggacggacgcgcctttcatccggacataaactgtaccggcatcatcgcacatatcaatgtcaaattttcttacgttgtcatctgctttgctgccttctgtgtaccggatatatgaccagatatgttcaggacacggcccgaacacttccacttcctgcatcgcaaacggcaaagaaagctcgtggctgtctgcatcgtcatgtatcgatcggacaagcagaccgacggatgcgtgaaaagcggcgtccatcatactcgggtgaagcgtatactgttcttttttgtcatgtacagctgctgggagtgaaatacgggccaataatcggtcttctccgatcagcaattgctgtacgcccctgtatgcctctccgtaatccagaccgatcttctcaaaagcaccgtaacattcttccgcagtcacaattcctaaattgcaggaagttttgacagactcgatatcaatctgggcgcttcccggttcggtaatgaccgcttcaccctggctgtgaataaccggatcttcgccgttttctgcctcactgtatatttcataggtaatctcaccattatcttctgggtaaagggcaatatgtatttccttcggtttgtcttcaatcatgaccggccggacccaaacaacctgcctgagtgtgacgctatggtctttttccgtcacggcagcagcctttttgaccgcctctgcggccatttccaaataggcgacgcccggcagtattttttgtccgttgacgacatggtcagataggaaaaattcatctcccgtaaaaagagacgtgaagcgctgctgcgaaaaatctgacgtattttcttgtaaaagcggatgcagcactgtgcctgacgggcttttctcctgttttttctgcttcggaatccaatagcgttcttttgcaaacggataagtcggaacgcttgttttacgcggtttatccgaaccgtacagcttattccaatctactgttttcccttctgcccatacctcggcaagccgtatcggatcatccgtctcaggagcggcttcgctcatctccggcagctcagcttgtccgcgccataaaccggggatgttttcgtttccttttacgaaatcattcagcttttgcttcaagtcgcggatgtcatttacaaggaagacagctctctcctccattgcttgacgtcctgtctgaattgtataagccagttcagacagcaccgtcttttctgaaagcgatcgggctagtttttccgcataggccagaagcctgtctttatttcttgctgacagcgggatgagttttgctgcatcgttctcaggtgcaggcgctttttgttcaggctgaatgtattcttctaaaatgatatgggcattcgaacctgatgcaccgaaggaactgagcccggccctgcgcggataatgtgtgactttaccgttttcttcagctgacggttgcttccacggagcagtctgctgctgtacgtaaaaaggagattcctcaaatttcaggtaaggatttaattccgcagaatgcagtgatttgacaagcgttttgtgatgaagctgcaacgccgcttttgttaacccgctgatccccgccgctgattctgcgtgaccgatatttgatttgaccgaaccgatggaacaaaattgctgatcctgcgtcccttggctgaacgcttttgacagaccttcaatttcaatcgggtctcctaacgaagtacctgtgccatgggcttccacataactgacggtccgcgggctgatacctgcttttttcagacaggccttaatgacttctgcctgtgcagcaggattcgggacggtaattccgcttactttcccgacgtggttaacggcgcttcctttaatgaccgcgtaaatgcggtcgccgtcttgttcggctttttccagcggcttcagcaataccgcaccgactccttctccggaaacgtagccgtccccgccctcgccgaatgtacggcagcggccgtcacttgagtgcatgcccacgcttccgtagctgagatatttcgccgggtgcagtgacaagttcacccctcccgcaagcgcggcctcacattcgccgcggcggatgctctcaatggccagatggacggcggtcaatgatgaggaacaaacggtatccaccgcgatgctcggcccgtggaagtcacaataataggacactctgttggcgatctgcgcataattcagtgaaaccggaaacggatcagtctcagataattgttctgcgccgattaaggaataatctttatgcatcacccctgcaaatacgccgatcggatgctgtttctcccctttatttcccagcgtttcaggcgtataccccgcatcttcaatcgtttcccagcatgtttctaaaaacaggcgctcctgcgggtccatcgtttccgcctcacgcggtgagattctgaaaaactgcggatcgaagcagtcggcatcttcaatgaaaccgccccattttgatactgtttttcctgacggggacgttacgtttttatatgttttccaatcccatcgggacttcggaacttcagtgatgcaatccgtgcctgccttcaggttttcccaaaactccgccacacttttcgctttcggatagcggccggccattccgataatcgcgatgtctccggtgtttttatgatgttctggcgcgtccggcgcttcagcttcagaccgtgatggttcggctgcacgttccgcacattcaaatgaaacggtctttttcagataggctgcgagttcttttatatttgtatattcaaagagaagagtgggcgcgaggtccgcacccgtctttttattgatatcctgtacaatctcaagcaaagaagatgaatccagcccaagctcatagtagcctgcaagaacgtccagcgtctcccaaggctgcccaagcttatcagccaaaagcttctttaaaaacagaatgatgtctttttcatctgcgctttccggctcagttgcagcctgttgattctgttcggctgtattctcgtcttcttcgaaccgaaccgcttttcccgtaatgtttttaagctccgccaccttttgtccggatcggctgaagtactcgatcgtcatcgttgtgagttctttttcctgacggacgccggaagcggcgatacgcgccgtgcactcagattgcagcctgtcggcggccgtgaacgattcataatataaaggcagatgaagccggtttgtttcagaaagcaaaccgctcgccccgattccgctcgcatccaaaagtgccggatggaataaaaagaaatcttttccttcttcgcaagaaagctcagccagcattccgccttctgtttcgtacaatcgtccgttcgatttcatcatgccggaatgaaccaagtcatgatccaggcatcggttatacatgtcatcaagattcagagatctgcctgactgcttcacatcgccgaaatcaatggtttcgtcaaatgtcacagcgtctcttttcaccatttcagctgtcgcatattgtatattgtctgacagctcgtcaccttgctgtttctgccctgaaagggagatgagccactttccatctccgctatcagaacattgaatggtcagaatgattgcagccgtttcactgacggttaaaggctgataaatcgtaacgtgcttcaattcgagctcattgtatacataaccgtgttcctgaaaaacctgataaatcaaatcgatataagcaagaccgggcaataccgcttcaccaaagaccttatggcccttcatgatgggatgatccagtgagatattgattttttccgatatcattccttcccactcctctctcatttaaatgctttccaaaacatttttttcgcaggaagctcttgtttctccgccggtgcgtcaggctcttttaccagagccttacgtcttaatgacggtaccggcagcggctttcttttcattcgggtgtctttttcttcccaagcttccagaatgacgtgggcgttcgttccgccgtcggcaaagcagttgatggctgctgacggtctggctgcatcccattcgccggctgttttatgaaaatgaaaatctgtctttgttatatcaaaatgcggcatcggttcatctcctgagagaaacggaaccgtttgtttatgcttcagcattaatacgactttaatgaagcttgcgatgccttctgcgcaaagcggatgcccgatgttcggcttaattgacccgatgccgagcggaacatgctggccagagcggtatacggattgaatcgccttcagctcaagcaaatcagttacagcggaacccgatccgtttgcttcgatataactgatgtcttccggctttttgccgcttttgaaaagcgcgctttgcatgacatctttttgcgcctgcatattaggagctgacgggcctgccgttctgccgtcattgttcatggcggcggccttaatgaccgcgtgtatcgtgtcgccgtctttttgcgcctggcttactgtttttaacagcaccatgccgacgccttcaccgaggacaactccgcctgaacgcttgtcaaatacgtgaaatgccggcttttcgtttaacagcccgcgctcttggaacatccggtgcgccgcatccgtgttcagcaggctgacaccgccaactaccgccgctttgatatcgccgcttctcagtgcctgaacggccatgttcattcctgtcaaagccgatgaacaagccgtatcaagcacgatgctcggcccgcgcagatcaaaaaattgcgaaacgtttgccgctaaataattctgcccgcccgcaacgatcgggttgcgggtattcgcaagaatttcaggatcaggctgatgctggcttcggcctccgatatacacaccggcctctatacccttgatttcttcacgggaatagccggcatggcaccaaagtttcaagctctcttccaacaccgccaatgcctgagggtccatcgctttcgcgtcgttttccggaatgaaaaagaattcggaatcaaagtgatccatattgtcaatcaatcccgcaacgtattgatttgcatatccgaaacgttccgccgggacggagccgattgcggacctgccgcttctcagcaagtcccaatattgttctaacgattccgctcccggaaaacggcagctcattccgacgacagcaatgtcttcagttacggcatcacgcttttggtcagtgtgaaccgtttgtacggcagccggaaccaacaatgctgtatcaggttcctccctttctgcaagcagcggctgcccattggatacaagccattcggaaaacgcgtcaatcgtcggatgttcatataaaacagacggatctaagtcctctttgagcgcttgattcatttgctgtaaaagctgcgctaaaatgatcgaatcaaccccgtaatcctgaaacggttcgtctgtttccagttcttccggagcgattttcagctcatcggaaaacagtttcacaagccacgccttcgtatcaataagcagttctctgtctgaatgtttttcagcggctttgccgtttattacggcttcagtctctttttgttttttctcttgacagagcagcctgtcaggatgccattcgctccgatcaatgatagccggcagaacggacgggcggatgttttcagataaaatgcggtccagcaagtcaagtccttccgcgttggacagtcccagcagcccggtctgcttcaggctttctgtgcggacttcacccaatccggtttccttccagttcggccattgaatgctgactaacggatattgatgctgatgagccgccgcgaaataatccatgtacgcatttgccatcgcataatccgactgtcccgccgcgagcgccggaacgactgcagatactgaagaaaataagacaaaaaatttcaaaggatcatttgtgaaaaggctgcttaatgtttgaagcccggcgactttcggttccagcacttcttgtatatcgtcagcagtctttctgataaacgccggatttactgaattaaccgatcccgcacagtgaatgacgccgcctatcggtcccatcgtgcgccggatcgtttcaatttccgctgccgccgcatcatgatcagacaatttcagactgatcaccgccacctgcactccttttgcttcaagctcttcaatcgcccgtatcttctctttcagtctcgtattaacggctgaccgttcatcgcggggaggaatcggctccctgcctgtcagcactacttttttcacgccgtgtttttctgtgaaatggcgggcgcataagagacccagtcccctcgtgcctccggtaatgaaaagcacatggtcttcaggaaacggtgcgggcttatgttctgctcgcttcccgcttggtatctccctgaataaagcacggtatctctgtccgtttcggcggcagatttccggttctgtgcagtccgccgaaaattcatctgcaatctgtttggcaagcgtctgctgatccgtatctgtatcggcatccatgtgtctggacgtcacgttttgatactcattttgaagcattctgtacaggccgctttttgccgctcctgcaagatgaatcgttttctgctgaaatggctccaagccttttgttacatatagcagcgtcagcggccgcgcttgccggcggcttgtatcaatcagagtctggagccggctgatcccttccagtgaagggtcttcgtctccgcatcccgtcagatcgattgcgccatctatgtgattccaatcgctagctgcagtgtcagccgaatcgaccgggagaatgaatgagtcagcgaaatgctttgcagtctcttcggctagctccgctgttcttccatcagccagaatcatgaccgtcttgccgcttttctcaccggccgaatcgatctcacacggaacccattgcttttctaaaagcacagcctcgcgccggtcttctgtttcctgcggtacggctttcggctcaggcagccagtacggctccttcgcaaatgggtaagccggcagactgattctgcggggttttttgccttgatagagtctgtcccagtccatctgaagccctttggcccataattccgctattttggcgtattttttcttatcgaaccatgacctcacaagctgcttcaggtcatcgtccgtttcaaatgctttgatttcttttttagccgttttgatatgggcttcatatatcccttcacccgtatttccgtttacaaaatcggttaaacggctgatcagttcttctctcgaaccggctgtaaccgcaagacggtaatccatcgcatcacgcccggtttgaagcgtgtacgccatatctgaaagattgatattctgattggcttttgcaaattcgatcacagactcggcataggtttttacctgaggcgcttttttcgccgacagcacaaaaatgtttgtctcatcaggctttcggcttccccggtctttcggctgatactcttcgataacgagatgagcgtttgtgccgctgtagccgaacgagctgacacaggcccgccgcggtgctccgcctgtttcccaaggtttgagttcggtattgacaaataaaggcgagtcatcgaaatcaaaatgttcattcggcgtgctgaaatgaagggtcggcacaagctgctgatgcttcatcgacagcagaaccttctggacgcttgctacacctgccgccgccgacgtgtgcccaatattcgatttaaccgaaccgatggcgcaaaattgtttgcggtccgttttttccttaaatacagaagacagggcttctaattcaatcggatccccctgctttgtgccggtgccgtgcatttccgcataggtgatgctctcagggtggatgttgtgcgcttcatacacttggcgctctaaatccatttggcttttcgcgcttggtgcggtaatgccgttggtttttccgtcctggttaattccagatccgataatgactccgtaaatatggtcttgatcggcttccgcatctttcagcctcttcaaaacgagcgcccccgcgccttcgccaggcacaaatccgttcgcactgttatcaaatgctttacattggccgtcaggagacagcattccggcttcacacatgctgatgtatgattcaggcgttaaatacaaggtcacaccgccgacaagcgccatgtcaatttcatgattcaacagcgcctgacgcgccaaatgagccccgacgagagatgaagagcatgccgtatcgatcggaatggccggtcctttcaaattgagataataaggcaggcgggccgccgcgatgctgaaactgttgcccgtcgcgcttcctcctgtctgatgtttgtttaacatcatgccgtattcattgttcataatccccaaataaacgccgcaatttttcccgtttaattcttttgagctgtaacccgcatcttcaaaggctttaaaaccttcctgtaaaaatatccggtgctgcgggtccataagttccgcttcagacggagatatattaaagaacagcggatcaaactcttcaatgccgtcaagcataccgattgatctgcagtatactttgcccttcttgtttaaggccggatcatagtatttgtttacatcccagcgggaaagcgggatgtcgcgaatggcgtttttcgcacgggctaagttgtcccaatatgtctttaggtccggcgcatccgggtacttgcccgacatgccgacgatggctatcgcgtccgctatctcgtctttaggctcccgtttggcctgcaccggttcaggttccttttgaaccgttaatctctccggctcggcaggtgttttctcctgcggggcatgttgctgcgtaagcggctttggacgtacgggaaccgcctgtttttttcttccgcggacagacggctgcgtacgcagaaaatcggcaaattgacggattgtcggataatcatacactttcgttacgttacagtccgtgccgtaccgtttattgacggcctttatccattcaagaccggtaatcgaatccatacccaagtcaataaaggcctcatcaatatctacttcatgccgctccatgtacaatacatcagccagtgcttttgataactcatcatgcaccgcttcaatcggttgttccggttcggcggaagctgccgtttctgacatcgcctccagaatatccgcttctgcttggatcacatgctgcttatgagcgtttaaaggctgcagcatgatgtttgacggttttttcacggcttctgttttctgcggttcggttgctttctcaaggatcggttctgtcccgagctctttttgcaagaaggccgcaaactggcggattgtcggataatcatatactttcgtcaccgtaagggacgtgccgtatgctttattaacagactttatccattcaagacctgtaattgaatccatgccgatatcaataaatgtgtcgtctgcgtcgatatcgtcggcatccatatataaaacgtctgccaaactttcggtcaatacggcacttactttttcagcggaaaccgccggacgggaagcgggctgtacggttcttttcggtttcgcgccgctcaaagactgcagtgtaatgtttgacggtttttctttgacagtctcctcgtgaagagttgttacttcaatgaccggttccggggcggccgccggtgcgatcggcgcagactgtgtttcggccggtcttttgacagctgcatctgctgatatgtcgatccaataactgtcttttgcaaacgggtaggccggaagactgattttttgcggtctgcccatttgatacagcttatcccaattcagcggaaggcccttcacccaaagctctaatacctttgcggctttgcctttttcaagccacgcctcaatggttttttccatgtcctcatcagccgcaaacagcgccatcgtgtctttattctgtttgacttgtccgcggtagagctggtcaattgacttcttgccgcccgtaaattcgtcaagcttctcttcaagctcgcgtaaattgctgacgatcattccgagacgctcttccatcggttcacggccgatttgaagcgtatatgcgatccggctcagatctgcttcccggtaacgcccgctccgcagtgcatcaagaagacgtttcgcctgtttttgaagccgttgctcatttttcgcagaaaggacgatcatcgacggatgaggcgcagcataagccgtctccttatcctcatcagcggaatattcttcgatgacaatatgagcgttgacgccgccggctccgaatgaggaaagccccgcggttctcggcaattctttatttactccgttttcatttatgaccggtcttttccactcttcaagcgtctgctgcactttgaacggcgtactcggaaaatcaatattcgggttaagcgtccgggaatgcaatgacggtgcgagctgcttatgcttcatttgcaggagcaccttcgtcagcccggcgatgcccgccgcgctttcacagtggccgatattggatttcgctgagccgatggcacaaaactgtttatcttgtgtttgttctgaaaaggcttttgtcagacccgtgatttcaatcggatcgccgagtgaagtcccggtgccgtgggcttcgatgtagctgaccgccctcggatcggttcccgcgtcttttaacgcctgtttgatcaccgcggcttgggcgttcggattcggtacggaatacccgtttgtttttccatcatggttcacggccgttcctttgatcaggccgtaaatatgatcaccgtccgctttcgctttagaaagcggcttaaggagtacggcgcccactccttcaccgggcacataaccgtctccgccttctccgaaactttcacatctgcctttgcttgataaaaatctgttctggccgagcatcaaatatttattcggatgaacggatacattgacaccaccggcaaatgctgcctcgcattccccgttccgcaagctttggcatgccagatgaatggctgttaaagaagaagagcacatcgtatccagagccatgctcgggccgttaaaaccgaatacataggaagccctgttcgcaattgatgacggatttccggtcagcgcaagcgattttccgcgcgcctgttcttcggctccgtaaagctgatattcctcgtacatgacgccgacgtaaacaccgacattggcgccaagcaaatcacccgatttttccgtgagctttttgcgcgtgtaaccggcatcttccatcgtttcgtagacacattgcaggaataaccgctcctgcgggtccatcaattttgcatcccggggcgaaatagagaagaattgcggatcaaatttgtccacgtctttcaaaaatcctccccattttccgtacgtcttgccttctttatctttatcagcgtcgtaataaagactgtgatcccagcgatcgtttggaatttcggttatgcagtcagtgccttcactcaaattcttccaaaattcctgaagattttcggcctgcggatatcgtcctgatataccgataattgcgatatcttcacgctctgtcagctgctgatttttccgcgtgtctggacggacttgcgcaaagccttttttgccttcattccgtttgaaaacgggctttactttcgctttctcagacagcgcaggtttggctgcaggggtttcttctgttttcatcccggtcacttccagcagcgtgtcccggtgtgctttcataaaatactgcgccagcgattcgatattctggtactcgaaaaacaatgtttttgataatgagccgaagctcttttccagccggcccgtcaaatgcataatcataatcgaatcaattccgtaatcttccataggcgccttggcatcaattttgccgacaggaagtttggtcacttccgaaagcacttgtttcaagaaatgctccgttttttctgcaagcatgttctctccgcctgctgtacgacctgccgtttcttccgtttcgctgcccttatccggctgatcatccgctgattttttcagaaacgcccggatttttgcggcgtagccttccgtcaccatgacttgggatgtgtttgccgcccacccgcggtataaagcctgaatgccgttttctgtttgcatagggaccatgccgctttcttttgtcagcatggcttccgtttcagcatcaaccgtcatgccgccgtctttccaaagcggccagcagattgaaagggtatgtccatagcgttcatttcgggcttttttacggtttcttttttcactgaaggcgttcataaacgcattggccatcgcataatcagcctggcccgcgcttccggcgcttccggctccggaagagaaaagaatcagaaaatcaagctcaatgtcctttgccgcttcatcaagatgaaccagcccggagactttcggcgccagtacatcacggatttcatctttgtgctttttcagaatatagttgtcttttatcgttccggcgctgtgaatgataccgtttaagccgccgtactgccgacagatgtcagctatgagcgattgaacttcttgtttttccgttatgtctgtttgtttgtacacagcttgcgcgccgagatcggacagttcttgaagctgggcttttttacggttatccaacagagaacgccccgttaaaataagaacggcgtcttttgcatgccgggcgatttctttggcgaataaaaatccgagtccgcccgcaccgcctgtgatcagataaacacctttatccttccacggcttttcggcgccgaactgttcaagccctgtttcctgccattgtgccgtatagcgcctgccgttttcatagcgaatatgcttgtcatcaggatgagcgctgcattcttttacatatcgggacagcgtgtctgccttgacgtccggctccgtttcaatcagctggcctgtcaggttcgggttttcaagcgccgctgttttcaaaagccctgttaagccgcaaaggagctgcgtatccgcttcttgaggcacgacaatctgaatgagctcgcgcccgccggaatttgaagcgaggattttcttcacttcttcgaacgcctgaagcgcacaagcttcaaaccgttcgtcttcactcttatgctgatcacggagcacatgacagctgaagtctctctgtatgctgttcatttgatccgtaaaccggtcagatatcatcacgtgacgggctttgaaatggatcggcgctttttcatgtacagcggccttctcttcccatacgtgttcaaaatatagtgtatctgttttatccgtttcaatttcccgtgcggaataaccagtcattttcacacatacattgccttgttcgtcacatacatcaatatccagcttctgcacggcatcttcaggcttgctttcgccgctgtacgcaatggaaacccacatattgcttttacagcttttcaacacatcaatctgttcgagagcaaacggcagcatcggccgtatgtcagtcccgtctctgtcaagcattaacccgattgtcgcgtggaaggccgcatccaaaaggctcggatggaggacaaactgatcttttgtatgagaaatagatgacgggagtgagagcttcgcgagcactttgctgtcttttgcatagatttccgtgaccgctttgtgagcatccccgtattcaatccccatttgtttgtatgcctgatagcaagcgtcaggtgtgatcagacggcgtgactctcttaatttgtcaatctcgattttggccggttcgcccgctcggacaaacgctgcgcttccttgcgcatagagtacgggctcttcttccgaggaagccgattcactgtaaaccgtaaatcccatctctccattttcttcgtcataaaggcggagatacagttctgcggactcatctgccgctgtaaacggacgtatccatacaacatgtttcagacggactgttccttcttccttcgtttctgccgcgtgttcaacggccgcccggaccatttccagataagccgcgcccggtaacgtccgctcgtttttgacgacgtgatctttcaggaaaaattctccgccgctaaacgaggaccgaaaacggacgcctgacatgtttgatacattttcatgcaggagcggatgcagcatgcctgcatttttttgcggcagcgattctcttttctccgccttcggcacccaataccggattttttcaaacggatacgtcggcaggctgatccgattcggtttgttttcaccgtacaagagattccaatccatcgttcctccgccggcccacttttcggcaatcatccccagactcccggaagaaagccatttatgtatcaagtccggagcaagctctgcctgtttgcttttatcagctcggttccgccagcacccgctgaccgttttacccgccagaaagccttccagccgctctttgagctgtgtcatattctgagcggtgaacgcaacccgctcctccatctgttcacggccgatctgaagtgtatacgccgcatcctcaagcggcaggccgggatgaataaatgcagacagcttcgcaacatactcttttagccgttcttcattccgggctgaaaccgggaaaatgaatgtctgttcttctgccggttcagcatttgttccgtgtgattcttcagggataaattcctccagaatgagatgcacgtttgaacctgtcgccccgaaagagctgatgcccgcacgccggggatatacggtttcggttccgttttccgtcactgatggctgctgccatgcttcggtatgatgctggacgtaaaacggtgattgttcaaaatctaaatacggattcagctcctccgaatgaagagacggcaccaaagttttatggtgaagctgcagggcaaccttgcttaagccgctgatgcccgcagccgattccgcatggccgatattggacttcactgatccgatcgaacagaactgtttgtcctgtgtgtactggcggaacgccttgacaaggccttgaacctcgatcggatcgccgagagaagttcccgtcccgtgcgcctcaatataactgaccgtgcgcggatcgatgcccgctttgtccaggcattcttcaatcaaatcagcctgcgcgacaggactcggcacggaaattccgctcactgtccccacgtgattgacggcactgccctttatcaccgcataaatccggtcgccgtcttttaccgcctctcgcagcggttttaataaaacggcaccgattccttcagccggtacatagccgtctccgtctttcccgaatgtatgacaaaccccgtctgttgaaaacatgtcccataaaccgtatgtcagatatttattcggatgcagcgacaaattgacgcctccggcaaccgccgattcacattccccgcgccgaatgctttccgcagcaaggtgaaccgcagtcagcgaagatgaacagaccgtatcgaccgccatgctcggcccgtgaaaattgcaaaaatatgaaactctgtttgcgatttgcgcataattaagagaaagcgggaatacatgatcttcagaagaagcttcagccccgaccaacgtataatccttatgcatcacccctgcgaagacgccgacgcgctgtctcttattccgtccgcgcgattctgcgagcgacttcggcgtatatccggcatcctcaatcgtttcccagcatgtttgtaaaaacagccgttcctgagggtccattgtttcagcttcccgcggcgtaatccggaaaaattggggatcaaagcaatccggatcatcaataaatccgccccattttgaaatgctctttccggaaggcgactttacattttcaaaccggcgccagtcccagcgagactccggaatttcggtgacacagttttttccttctttcaggttttcccagaattcatgaatattttcggcctgcgggtagcggccggccatgccgataatcgcgatatcttcatcttgcggaacactgcttttccgtcttctctctgtttgcggctcaaccggcttctccatttttgccggagacgcgctgaaatggctcccgtactgctcagtcaggaaagctgccagctctgctgccgtcgtatattcaaacagcaaagtcggagaaagggtttcgccgattttttcgctgatcgtttcgacgacgtcaagcagtccggacgatgtcagccccatttcatagtagccgacttgagaatcaatctgttcaagcggcttgccgattttttccgccatcagattcatgacataccgttccgcttcctcatgcgggtgtccgccttcaagcgatgccgcaacttccggtaaaccggctttttcaggagatttctcagcagtctttcgttctgtattgatcagctcggcatcccgcacgagcttgcttgtgaaatctttcagctcggctacttttcggccggatgcgttaaaaaactccagtgtaatgtaaatgagctccttttcctgccgaagcgacgaacgtttgattctcgtgatgcagccggcctgcaaaggttcggaagctgtaaaagattcgtagaaaagaggcagaaacagcctcttttccccatttaacagcgatgagatcaataggtttgcgccgacgccgcttccgtcaaggagagtcggatggaacaaaagccccccggcctgtcccatcgcgtcttttccgagcgatacatcaaagatgacgccgtcccgctcctcaaacacttctccttctgctttcatatatccgctgtgaaccaattcctggcttctgcattgtgcatacagctcatttaaatcgatggtgcgttccgcctcgcgtttgacagagtcaagatcaagcgtgtcactgaaaattgcgggtgccgtctcgtgcatttccgctttgacgtaaatacgttcttccggctgtactcgtccgccgctgacctcagccccttttgcggtaagtttccagcgcccttcttttacctttgtacattcgaccgtaagcttgacggcgctgtcttctttcgcaataagcggctgatatatggataaatggcgcagctgaagcccgtcgtatgaatagccgcgctctttgaaaatctgataaaacatatcaatataagccaatcccggaaggactttttgtccgtaaacgtcatgatgtaaaataaacggatttttcagcgataaagtgatttgcttattgaagttcttcacgttaaacctccacttcataggtatcccagatgtttgccgcagctttttcgttcgtttcttctttgctgtccggcgaaatcagccgcttatttaatgcaggcggtgttaaaggatggcgcttgattcggcgcccttcgtcttcctgccacgcttccacaatgacgtgggcgtttgttccgccgtcggcaaagcagttaattcctgccgccggtattggtgacggccagtctgccagagtgcggctgaactgaatattggccttttctctatcaaaatgtgtgttttcatgctcgcctgataaaaacggaataaagctcttttctttcagcatgagaacaacttttatgaaacttgcaattccttccgcgcaaagcgggtgcccgatgttcggtttcacagatccgattccgagcgggccggcgtcttttgaacggtagacggattgaatggccttcagttctaacagatccgtcacgaccgtgcctgaaccgttcgcttcaatatgagtaatgtcttccggctgttttccgcttttttcaagagccgtcttcatgacggatttttgcgcttccagactcggcgtagccgggccggccgttcttccgtcattattgacggatgccgccttcactacggcataaatagaatctccgtcttcaatcgcctgagacacggtttttaatagaaccattccgacaccctcgcccagcacgactccatcggcgcgttcgtcaaatacatggaacgactgcgctttacttaatatgccgcgctgttcaaataatttatgggtttcttctgattcaaacaggctcacgccgccgacgacggccgcttttatttctcctgttacaagagcctgcacggccatattcattccgactaaagcagaagaacaagccgtatcgaggacaacgctcgggccgcgcatatcaaagtattgagagagattggcggccaaataattctggccaagcgcgacgatcgggtttttcgcgtccagcagtttctcttcacccggtctgtgacggctgcgtccgccgagatacacacctattgcttctccctttatctcatccggcgtatagcccgcgtgataccacaggttaagacattcttccagagcggccaaagcttgagggtccattgcctttacatcttcttcagccagtaaaaagaagtccggatcaaattgatgaattccatcaagcattcccgcgtaataaggcgtcttcaaaccccatcgctcagccggaacaggaccgatagccgaacggccttcagccaaaagcgaccagtatgcctctaaggaagccgcccccggaaaccggcaggacatgccgacgaccgcgatatcttcccggtgaatctgtttttcggccggctcttcttgcaccttaacggcttgtgtttcaattaccggctcagccggcttcttcataacaggctccgccgccgccaaatcaaaccgttctgacaaaacttctgtatatccttcgagaagccaatttgcgaaagattgaatcgttggatattcatacagaatggacgggtcaagcgatgccgagagattccgattgatccgctgcagaagctgggcaaggataatggagtccactccgtaatcttggaataatacgtctgtctcaagctgatcctggtcaatccgcagctcttcagaaaataattctttcagccattcttctgttttccttgttaattgagcgttgtctgcggcagtatcagcggttttttccgccggttttaccatagccggactcattggctgatcctgcctgctccgccgcaggaatcgctccggcttccacagcttaggattcagaacggccggcagcaccgggccccttgctgattcaataagtatgccgtcaaggagctgtaatccttctgcattcgtgatgctgtatagcccgctctctttataagctttgttcgttacttcgcccattccggtttctttccagttcggccactgaatgcttacgatcggcagctgctctttgtatgagtttgcaaaatagtccatatacgcattggccatggcatagtcggcctgtcctgccgaaagcgccggtatcgcagctgacacggaagagaacaagacgaaaaacttcagcggctcttcgctgagcacactgtataacgcctgaagcccgtctactttcggctcgagcacgcgctgtatgtcttcatcggtttttctgatgaatgcgagcgtctctttatcggtcacacccgcgcagtgaatcacgccgccgataggtccgagcgtctgttttatctgactcagttcctgtctcagcccggcttcatcagctaacgggactgacaataccttcacttgtacacctttggattccaagtcgagaacagcttcaattttcgcttttacagaagccgtcaccccattcagtccgcctgtccactcacttcgcggcggaagggtctcacgtcctgtaagcaccagttttttcactccgtaatgttcggcaaaatggcgtgcgcataaaagaccgatccctctcgtccctccggtgatcagaagcacatggttgtccggaaaatcaattctctcgccttgcatattcatattttctgagccgctcaatacggcgcggtagcgcaagccgtccctccggcaaacttccgcgtcatcagtacgggcatgaaactcatcggcaatctgcttcgccagtttgtcatcagaaagcgctccttcaaggtcgagatgccttgaagacagatgaccgtactcacatgccagcattctgtacagaccggcccgttttgctcctgttgtttgattggcctctttatttaatgactcaaggtctttcgtgacacaaagcagtgttatcccttctttatgcccatgctcaatcaattgctgaagccatttgataccggtcatatctccagaagcttcttctttcgctgcgccgagaagatcgatgactccgccaaacgcctgccagtcatatacaccggtaaggtctgatgttgtgataatacggtgattcggcatatgcgctgcgatctcttctgcgagattgatcgtgtccccgcctgtcaaaatcgcaacggaacgtgggcacggttcacgcagttcgagcgggctcggttcccattgtttcgtcagaatacgtttcatccgttcctctgtatggaccttatttttgtcaggattctccggtacccaatacgtgtcttttgcaaacggataagacggtagactgagtaaacgcggcgtacccttttcatacagccggttccaattcaacacaccgcctttcacccatacctctgccagcttggcgaatttgccttttctgatccaggcgtcaatgacgatgtccatatcttcatctgccgtgaacaaggcaaacgtatctttattgcggtgagactggccggtatacagcccggcgatgtttttctcatttttcgtaaatgcttccagctttgtttccaattccgccatcgtcgctgcaagaatggccaagcgctcttccatttcgtcccttccggtttgcagcgtataagcgacgcccgccaagtcttgatctgtatacggcgtttgacggatcgctttttgcagctgctgcgcctgttcaaacaatttttcttttgatttggcggacaaaaggatgattgccggattttccgggctatgctcaggctgagcggctgctttcgggacatactcttcaatgacgatatgggcgttgaccccgccgatgccaaatgagctgaccccggcccggcgcggaatggcatttccgtttctatcttttgctgccgtccattcctgattttcccgcacgatgtagaaaggactgtcatcaagctgaatgtacggattgatcgtctcgcaatgcaggcttttcaccagcgttttgtgcttcatttgcaaaagcactttcatgacgcctgatactcccgcggcaagctctaaatggccgatattgcttttgaccgaaccgatgccgcagcggtgaccggagacttcaggctcttgatttgttttcgccagctcgtgaaacgccgctttcagaccatttatttcaatcggatcgcccaattccgttcctgtaccgtgcgcttcaatatacgtgacggtgctcgggtccactcccgctttccgatatgctttcaccaataaatcagcctgcagtttcggattcggcgaggttaacgtattcgcccggccgccgtggttttcagccgtaccgcggatcacgccgtaaatcggattgccgtcacgttctgcatctgtcagtttcttcagcatcagaattcccgcgccttctcctctgacatacccgttggcatccttggagaaggttttgcattttccgtctttgctgagcatgcctgctttgctgtagctgatatgcgcttcttccgtcagaatcgtgttgattcccccggcaatcgccatgtcgcattctccgttttctatagcggataccgcccggtgaatcgccacaagcgagcttgaacatgccgtttcaatcggctcgctcggcccgtgaagatttaacaaatagctcaaacggttcggaccaatggaaggaatcatgctgcctgtcgccgcatgtccttccggcgcaagacctgcccttgtgaacaaatctttataaccggtatttccggtgccgataaatacgcccgtatttgtaccggaaaggctttccggcttacagcccgcatcttctatcgcccgccatgcataagtcaataacagccgctgctgcggatctaaatattgggcttcccgcggtgaaatcccaaagaacagcggatcaaattcagctattccgtcgataaagccgccccacttgatattcgttttgttcccttcaagattcgggtcgccatcaaacgcttgccaatcccagcgttctttcggaatggttgtgatcgaatcctttccttctttcaaattgcgccaaaattcctctatatccttcgcgcccgggaatcggccgctgattccgacaatggcaaccgggtccaagcggcgcggctcttgtgccgctgccctagcgttcattaccgttgcgaagcgctttttccgatgcattttcggtttttgggcttttggctgctcttttttcggagactccttcttcttttcgccgaaacggcccggatgctcttttgccaaatatccggcgagattactgatcgttccgtactcaaagaaaatcgtcggcgccagctccagctgatacgcttcatttaattgattcgtaaagacggtaaaggatacggaatcaaaaccgtattcactcagttccgtatctgtctcaatgtcctcacggtcaacttttaaaatgctgcttaccatggctgtcaaagcggtgtgaagcgcttgaagagattcttctgcatcgtgtttttcttccggctgaaaaggaaggccggcttctgcctcatccgtcaaatactctgctaaactgcggatcgtcccgtgttcgaagaagatcgtcggcgccagctccagctgatacgcttcatttaattgattcgtaaagacggtaaacgatacggaatcaaaaccgtattcactcagttccgtatcgatatcaatctcgtcttggccgacttttaaaattgaactgaccaatctgataagcgcaccgtgccatttgtctcccgaaacggcggatacaggctctattttctccacctgcggcttttcagtttcagaaacggacaggaacgactgttttaattttgctgcgtgtccttcagctgctaaaagctgcggcctttcctgagccattccttcataaaatgcagccaggcctgacgccttttgaagtggaaccatgccgaaagcttttttcatcattctctccgtctcgtctcccgcctgcataccgccatctttccacagcgtccagttaaaggcgatcgtttttccgtgccgcaggccattctccgtaagggattgcctgtaagcggcgtatgcatccataaacgcgttgccggcggcataatcagcctgcccgacattgccgagaacgccggaaacactggagaacaatacgaaaaagtcaagattgcagtctttgctggcttcatctaaataagcggttccgatgactttcggatcaagcacttccctgaactcttccttcgttttttgcagcaggaagcggtcttgtatcactcccgcagcgtgaataattccgttaagctttccgaattccgccgtaatctctttgatcagcgcttcattttcccgccggtctgccgcattcagctttttgtagacgacatttgcgccggagtgctgaagcatagcaagctcacgctgtttggcttctgccagatttgagcggccggtcagaatgattttcgggtgttttacgcgacctgcgatttcttttgcgaacatcaagcccaggcttcccgcgcctccggtaatcagatatacaccttcgtccttccagacgatgccgccccctgcgggatgcatttcttcccaagccttcacataccgtttttctcctttataacggatatgtttatcatgcggccgatgactgtcgtttttcagtttttgagcgacagccggcatttcgccgattgattccatttcgatgagctgacagtcaagttttccgtattccagctcggctgtttttaacaaacctgttaaccccgcaaacaattgctggctgccgtctgctgagataacggtctgaatcagaatgcggccctgccttttttcgctgatgatccgccggatgtgttcggcgattgtctgcgcaaagctttggaagcgttcagcggctgtttcaccctcaccttctgcaatcaacagttcggcgtctttcaggccggatgccgcttcatcttttatacggcaggcatcttcacaaagtatgatcaaatgctcatcagcatggacagaagctttctcggatgcggcggcttctttccagaccggtgcaaacaagaccttttctgagcctgatagccgctgagccgattctgcatcgccttcaagcactctcgtagagaatcctctcaccttcacgcaaagcgctcctgtttcgtcgaacaggtcaatgtcggctttctgcacggaatcaccggtttgatatccatcgctgaagcgtgcatgcgcccgcatagccggcgtgcatgctttgatgacttcaagatattccagcgcaaacggcagaatcagcttttgtccggaaaactcctgcataatgcagatcgtcgccgtctgaatagccgaatcaatgatgctcggatgaagcgtaaattgttcgttcgtgtgagaaacagaatccggaagctgtatgtccgaaagcacttctttctcgccgataaaggcggacttaatgccttggaaggcttttccgtggaacatccccctgctcctgccttcccgataaaaggccgccggatcaagaatatccgctttgcatctgttttgtatggcagaaaggtcggcctcaggctcttgttcagccttaatgatttcggcccgtccttggctgtgcagcacttcttcatcctcagcgtttacgctgtatatgtcatatgagatgatgccgtcctcttcagggaacagcgcaatatggacctggcgctcttgtccgtgaacgacgatcggtttcatccagaccgtatgatggagcgttattctgtcttggtcttttaaaaagccgccaagcccccgttttaccgcttcataagacatttccaaatatgccgctcccggcagcaccgctttttccctgaccacatgatccttcaggaaaaattctgagcctgtaaaccgtgagctgaaccgctgaacggccaaatctgacgtattttgctgcacgagcgggtgtaaaactgagactccggtgtgtgcggcagatgtgttcttttctgcttttttcggccagtacggctcctttgcaaacgggtagaccggcacgctgattcgtttcggatgcttgtctttgtaaagcttgtgccaattgatggcgacgcctttactccacatttcacagagcttcggtccttttcctttcgcaagccatttctcaatgagttcagcgctgtcatcatcatcagaaagccaggcaatatctttcacctgctgtttttctcctctgaagcagcctgttacagccggcttatcattgataaaatcggcaagctgccgcttcagctccgcagtgccgcttgtgataaaggccgcacgctcttccatcgcttcccttccgacttggaacgtgtaggcaagatcagcgaggccggcgtccgtttttctttccagaaaagccagcagctgttttgcgtactccttcagacgatctttttttctggcagacaacggaatgatgaacggaccggcagcgtctgctgcttcggatgcatccggatattgttcaaaaatcgcgtgtgtgtttgttccgccaagaccgaaagagcttaaagccatgcggtgcgctctgttctcacgggttaactctttcttttctcccgctacgtaaaacggagagtcttctaaatgaagattcggattcggctctttgtaattgatgctcggcgcgatttcctgatgatataagctcatgacaaccttgatgcagcccgccattccggccgctgtatccaaatgcccgagatttgttttgactgaaccgatgccgcagtattgttttttatctgtatatcggccgtacaccgattgaagtgcggacagttcgatcggatcgccgagttttgttcctgtgccgtgagcttcgacgtacgcgatcgtttcgggatggatgcccgtctgatcaatgaccttctgaatgacctcagcttgtcctttgacgctcggcgcataaaatccgaccttatccgctccgtcgttattgacgccgattccgcgcagcagcgcataaatatggtcgccgtccttaaccgcatcagacgcttttttcaagagcacggcgccggccccttcaccgccgatcattccgtcagcatccgcgtcaaacgctttaatatgcccgtcgctcgaaaaattcagccccggctgatgaacatacccggcgcttgattccgtatgaagggtcgcaccgccgacaagggcgtacttggcttcgccggactgcaggctttgaaaagccgaatgcaggccgattaacgaagatgagcagttggcatgaacaaaatagctcggccctttcaacccgagtttatgagaaatcatcgtcggaatcgtaccgctttgggcaagcacccatgacacgtagccatccggcgtttccagctgtgctgtcgtctcccccggcagcaggctgcggtaagagttcgtgctggcagacatatacacgcttgtttccggaatttctttggagatataccccgcatcctcgattgccttccatgaatggagcaaaagcattctcagctgagggtccatatattccgcatctttcggtgaaaagccgaagaaaccgggatcaaacatttctttcccctctaaaactgatttagccggaacgaagccgggatgatcagccagttcttcagaaataccgaatcggcggagctcttcttttgaaaagaaggtgatgctttctttgccttctttgatgttattccaaaattcataatgatctttcgctcccggaaactcacaggatataccgataaccgcaagactgtcctcgtaataatcgggaaattctcccgccgggtgttcccggtcttctgcattcactttcttttgcggtacaggagccaaaacggcttctttcggtttttgttcagcgatataccggctgatgtcttttaccgtcgcgtattcaaacagctccgttacactgaattcacaatccaattcctgcgtcatccggtcagtgacagtcacggcaagaagcgaatctccccccgcatcaaaaaagcggtcatcaagctctatatctttgcttttcaatacatcctgccaaatcgccagcaccgcctgctggatatgagatgatgaaaatgtttgtgtgtccggctgcttttccgtcagatcgcgggcagcaagaagcttgcggtccacttttccgttcggtgtgagcggcagctcttcaagacggataaacgaagctggcgtcatataggccggcagcgcttgtttcaaatgattgcgcaattcctttgcagacggaagcggctctccgtttttccggatataaaacgcgcaaagcttctcatttccggagtgattgttcacaaccactacactttcctgtacggccggatgggcattcagcctgctctcaatatctccgggttcaatgcggtagccgcggattttgacttgggtgtccatccgtcccatgtattcaatgcggccgccgggaagaaaacgcgccatatcgcctgttttataaagctttgatcccagttcgagccggtggctgacgaaagctttatctgtcagctcaggcttgttgaaataccctcttgccaatccgtctcccgcaatacaaagttctcccggcaccccttctaaaacagggttgagaccggaatccataatatacacgcgggtattggcgatcgggcgtccgatcgtaagcgcgctctcattctccgttatccgctgcaccgcggaccagattgtcgtctctgtcggcccgaacatattccaagcctcacttttcgtatcgagaaactgctgcttcaattgttcgctaagggcctcaccgccgcaaaggattttcacattttcttcatttgaccatccggaatgaaagagcattttccacgtaaacggcgtcgcctgcatgatcgtcggtttgtactcttgaatcagctctttcagcttccgtgcgtcttttgtgacttctgtcttacagatgttgcactccgctcctttgattaaaggaaggtaaagctccagtgccgcgatgtcaaagcaatatgtcgtgacggcaagcagtttgtcttcggacgaaagccccggttcattcgccatcgagagtaagaaattggtcagcgcccggtgcggaatcatcacgcctttcggtttgcccgtgctgcccgacgtgtaaatgacatacgccagatcgtcaggtgtcactaaccgcttcagcgacgttctttccgcggctgtactttcaatacgagaccaatcgcggtcaatggcagttgtctgcacgcctccccagttcaaggagtgctctaaatcagctgtcgtcagacacattgaaatcctgctgtcggtgatcatatattccaatctgtcagcgggataagaaggatcaagcggcacatacgctcccccggcttttaaaatgccgagaaggccgacagccatatgcaatgatcggtctgtataaatgccgatgagatcatcagggcctgcaccgtgcgcctgcaaatagagcgccagcttcgtgcttttttcatcaagctcacggtacgtcagcttttgctcttcatacacgaccgcacaagcgtccggcgtttctgccgcctgacgttcgaataattcatggaagcaggcatccggatattcacggcttgtctcattccaagtattaagaatcatgtgctcctctctttttgtcatgagagaaacgttctcaagcggcgtatccggattcgccgtcaaagcttcagcagcctgtacaaattggctgaaaagtctggccgcccctgcttcgtcgaataattcggtgctgtatttaatcgtaagatccatgcctgatgcttcttcccacatttcaaatacaagatcatattccccctcttgatgaatgtcttttacaaactcacaggagaattccttgtattcatcaagcatcgattgatagctggaatgctgcagaaagttctgatagaaaaaggcattgctgaaaacaggcgaaccgttctgccggggtttcgcatgcacatcacgcaccattttcggaaacggataaaaggagtgatccagtccgtccagaacggcatcctgcaccttttgaacaaagtcagcaaatgtttcttttcgtccggctctgctccgtatgggaagcatgttgaggaaatggccgaccactcggtcaaaacgttcttcgggtctgaccattgcaggcatgcctgtcacaatatcttccttatccgtatatttgcttaaaagcaccatgtaacagctcagcatgacggtagacaaatgaatcgaacgggatgcggcaaacgccgttatattattcagcagccgttcgggaagacggcgtgtcagtgtatcttctgtaaactccggaacactgctgtccgtgcgcatcggcggaagctgaaggtcaggcagatcgccctcgagctgtttcatccagtaagcgcgggcagctttgctttcttcacccgctaaataccgcttttcccaagccgcgaaatcgggatgaataccgggagcggcagctgtaaactcttcttttccctccagcagcgcctgataatgatccagcagactgtgaataaatgtaatggatgaaatgccgtcaaacacgatgtggtgaatgaccgtcaaaagataatgttcctcggcggattttgaaagcagctgcacgcgcagtaaaggtccgctttctttgacaaacggctctttcacttttttccgtatcagagcggatatttgtgattcattgacgtcagaaatatcttcttccgagaatacaaaaggatctgccgcttctatgaaataaaacccgccgtctgtttcattcacggcgcttttgagcatcggatgctgctttaatacgagctgaaacgcctgtttcagtttctctttgtcgattccggatgtgaatcggaaacagagcgggacatggtatgcagtcgtttcaggcgacattttctgcaatgtccacagccctttttggacttctgaaagcgctggcgccgtttgccgtctctcccgttctgccggcggttcggctttttggggatgatggtccgctgacatgtttgccgctttttcagcagtataagccgctaaagcgccaatcgtcgggtttttgtgcagctctcttgccgtcagccggatgtgatacgttttttcaattgatctggcgagtttcatcatcttgatggaattgacgccaagactttgaaacggcgtatttggatcaacgagctcatccgcgatggaaagttcctctttcagaaaacggataaaatcccgttcaatttctttctctgcagaagccgtgtctgaattgctgccttcttgtctgttattatgtaatgaatcaaattgcccttgttcaaatgaatgtttcagctgagtgcgctggattttcccgatcgccgtcttaggaatgtcttcttttgcgaccggaagcagataatcaggggtaacgccgattctctgtgtcacgtgctggtgaatgtgatgaagaagcttcgtcatgcggttctcatccaacggaacagatgtcacaaagaaaatcgccagctcatctgtcgtgctttgattcggccggacggcgcatgccgctgtatatgacgtttcaatttccggcaattcctcaacggctgattcaatggcatggctgtaataattcacaccgttgataatgatggcatctttcgtgcgccccgttatcgtcaggcggccttcacgcagaaatccgagatctcccgtttcaaaccagccgtcttctgtaaagacactctcatttaagtccgggcgctcataatatccgctcgttacagtcagacccgacacttggaagcggccgatttctccttcttccaccacttgattgcggtcatccgtaattctcatattaaatcccgggatcggcagaccgatctcgacgaaacgatcgtcgtcactcgtgttttccaatgtaaactcatctgagaaaataacgcccgaagacgtttcggacattccccatgcgggacggatggcattagccggcagaccgtgcggctctaaaagctccataattctgcgtccgactttcgcaaccgcggcctccccgccgttcagcatgtaacgcatggaagataagtcccatttccgcgtttgaatctcttctgcaaaatcagcaagcagcccaaaggcaaaatttggggcccacgtgaccgaagcgcggtaatgatcaatcaggtcgagccattttaaagggtccatcaaaatggattcgctcggtatgttgatttcctcacatccgagataaacatcacgcagatgaagcattccgatgccgccgacatggtcaaaaggcatccagttaaacgtgacatcctcacttgtatagccctgcatctgaatatttcctttgaccatgcagacgatgttttcatggctgagcatcacggctttcggcgtgcccgtgcttcccgaggtcaaaagcagcatcgccaaatcttccggacggggatgatgacagtccgtatccatttcgtgcgcactgagatcttctgccgccaaagcgcaaaacccggaaagctcctgctcctccgcccattcagtcatctccggcagcacgtcacggcttgtgatgacatacggctgattcaaaagcgtccaggcgtctttcagtttttgcgtcccgctgttcatttctgtataagccggagcggccgcaagcggaaccgggatcgctcctaaaaaaacacagccccaaaaagcaggaatcaactgggaattgtcactgagctgtaatatgacttcatcctgagccttcactcctgattggcggagccctttcacaatcgaaagagcgatctttttcaggccgctgtaagtctggtacactttggtgccgtcaggctgtatatatgtgatgcccttttgatctcccgctgccgcggcggttttgtgcaggacttcaggaatcgtcatcggctgatccgctgaaagccgcaatgattttccatagctgacagatggcttgagtaacccgcttgccttcatatcacttttcatagagctgcctccatttcatctgtatgtaagatgtatgtcttatactccgtacatcgtcgtgattcgttttttcacttcatcatcatgaaacgtctcatcgtgcatgattaactccttctcaatgacggccggaagctgctcgcgaaacggcgtcactaagtgccttttcaatgtaattaaagagtttctcggtttttccgcaagctcacgggccaattcctgcgcatagtctagtacttcctgccgaggaagcaccggaaaaggcacccctcttttctccaggtcaccgccgcggtagtggccgccgtttaacagcatttcatggccgaggcttgccccaagcttctccggaacgataaaggtagcgcccattccgggggtgaaaccgtatttcataaagtttgcggtatacacgctttctttgcttaaaatgacaaaatcactgaaaagccccatgacaaacccgcctccgattccgtgtccctgcatggcggaaatgacggggatatcacattccagcgccaaagagtacatgcggtcttccgtaaacttcgtgatgccctgctgaatcctgagcaggccttcctgtgtgcctccggaagcaaagtaatggccgtaccctgttaaaatcacagctttatagactgacgatttttttatacgggtgaatgcttccatcaatccatccgtcagttctttggagaaggcgtttttatgggctttatcctgcattgtcacttggataatatccggttcaatttcgagcagttcaactgcggcgttcggcatgatatcctcctaactgttctccgtttcccaaggaagccgccccgtttctgcataacggaagatggctgattggttatccggatctgaaaacatcgcttgattttcggctagagcaatggatttcgaacgatgaacaaggtcgtttaaggaatccatgtattgtttatagcggatgactgcttttttcgacagtgggcggaggcgcagcaaatgctttctcagctctgttgctgagtccgggacgcatacgtcacaaagtccccattcaagcgcctggcgtgccggcacgggctttgtcatgatcgtcatataatgcgccttttgaaatccgattctttgaattaaaaacggcagaacgcaggccggataaagtccgaataacagttcagataaactgaacgaagcattctcctctgctatgacgatatcgcacgcggcggcaaaaccgacacctcccgcatttacttgtccgcggacgcgggcgattgtgatgtacggcccggattttaatgccagccacaaacggtaaagcggctcctgcgattccgcatgctgcattccctgcctcattctccggtacatctcatcaaaatccgccccgaaacaaaatacctccggctgcccttcaagcactacggaggtcacggagtcttcacattcagaaagaacatgcaggcattcctccactaaacgctcattaatcgtattgttggcttcaggccgatcaaaggtgatgaagcagacattttgctgaaaacggacgtttatcgtttcataggtcacgatatccacctgtatttccgatgaaattccgtgatttcttccaaatataaacgagggctcccggcatgatggtctaaaatgttcggaatcatattcatatccaatttgacattccgggtaccgaacttcaccagaccgctgcctttaaacagttcttcatattcttccatggacagcctgtacctgttgttcagatgctcttctattttgaaagaatgctgccgcgcttgcccttcaggcgtcacaacgccgctgtaaaattccgaacagcatccggagccgtaggagaaacagccgatccgcttagaagtgccgaatgccccttggtcaatcgtgcttgcaagagccagtaaagaggctgcccccataatgtttccgactctttggcagtagcggagccccggctctactctggtttgaaaatcttgttcgatctcagcgtttttcgcttttgcaagcttgcgcatcatcgtccggtgggcccctttgaccatgccgccaaacggtgtatggaaggcaagatagtgaaacgtctctttgtagtcagcgcccggcacacggtttttgtactcgcgaaatgtctgttcacagcaatcgaggtaagacatcaatgacaaatcggcgtcaccggcttcactgtccgggatcggacggcatgtatccatcacctcatagccgtagtagccgttggcgcccgcatccgcctgaaatacgattggattttcaccgatcaataaggcgacggcacccgctccagcgctcggttctgcgtaagaccaatcctcgcttaacgcatcgccgccttcggcaattaaaaaccgggaaatatccgtcgcgacgacaagcgccttcgctccgggggatgtctgcgacaaaataaagttaagcgccatctgcaaacccgccgttcctgaataacaggcttgtttcagttcaaataaacggcagttccggttgaggcctaagtaatcatgaatatatgtactgagtgattttccgaagtcgatgccggactccgagcaggtaatcagcagctcgattctgtctttttcagcctctgtcaatcggtcgataatcggctttgccgcgttaacgccgaatgtaacggggtcttcgtacggaagcgccaccgctttttctttcatcagtaaattctcaaatctggcagggtctaagtttctgtactccgccagctgcatgacatcaaggtatgctgtcccgccaaacacatttatcgcttctattccggcagccgccatgaacttcgcctccaatatgaattttgagtttccgattatttcaccgttttatcagacagcctgtaccttttcataaagctttgccgccaattcgccgatgtttgacactcccgtcagctcaacacgcgggatctgcagtgataattcttcaagcatcatcgtgataatttcggcgcggtccactgaatccgcccccagatcaactaaccggtcttcctgcgaaagctgttcgccttctaaatcaggtaaaacctcgtagattgtgttctgcagcaattcaaagattctttctttactcattgtcagttcctccctgtttcatcttttatgaatattccatgttttcaatctatcatttcgtcttgtcaacacgtttgcaaaaatgaacctaacttctgattcaaaagcgaggccgtctcttccataagccgcatgccgataccatcggcatggcggtttttccaggactccagctccgtacctttcacccattgattaaaggcgcctaatgccgggccgcaatgaatctggaagtctaccttggcatccgggtctcctttaatcgccgaagcagagctttgcctgaaataccatttgaatatgagcgccattttctgtttcggattccgttcggcttttgaaatgtcttcattcgaataatgagccttcactttgtcataaatactgcttacacttgccttaaaatacttctcttctatttgtctgagtgtcttttcatcaatttcttcaattgagcggtgacgctgatacagttcatgcagcttagaggcgcgggtcggaaagaacagccctttctttaatacctgcaccttgctgcctgattcaaacatatcgccggccggcgcgtaggccgtgtcctgtacattcatctgctgcaggaggtcctttacgaggccgctcgtcgctgcctcaacggtgcattggttaatagatccggtcacaataaaatcagcgccgagcataaatgcggccatggcagcctcgggcgttccgattccccctgcggctccgatgcggacagttttgccgtatcggtattttttcatcatgtcatctcgtaaacggatgatcgccggcatgagactgtaagcaactccgccgtcagtgtggccgcctgaatcagcctctacgcagatgtcatgcgcaacgggtatttctctcatcagacttgcttcttcagcggtaattttgttttcggctgcaagtttctgcagaatgtgatcaggcgccgggctgagaaacgcttccgctacttccggacgggacagcttggcgataatccgctgacgcgctattatttgtccgccggcaccgcgttttaaccccttagcgcgaaaccttactaaagcgggagtaaccgttaaaaacgctgatgcttccaagttctgaaccccatgcttcagtaaaagatcaatcattttttcttctgaatctgtatgcttcatgttatgtacaacatttatgccgaaggaaccgccgtcacgaagctcatgctgaattgacaaaatgacgtcctcaacgtgcgcgatgttcaaaccgcccgttccgaaaaagcccatcattcctttttcagccagtttgacaaccatttctttcgaagaaattccgcggtacatgccgccggccaagtaggcgtatttcaattgataatcgcgcttaaactcttcatttcctaaagacgccgccgtaattgagctttttccagcctcagccgggactttgatttcatctgttatcggctccgcttcagccgtaattctttgtatcagccccgtcagcacttttccgggaccgatttcctcaaagctcatgttctttcttcccattaagaaacggatgctgtctgtccagttcaccgatcccgttatttgtccggtgagtgtctctttcagctctctctgctcatagggtcttgccgtcacatttgaaatgaccgggatggacagcggcttaaaatggaaagattcaataaaccgtgaaaactcttccttcgcttccagcatgtatctggagtgaaaggcgccgctgacatttaagcggtgaaccatttttacgccgtttacggcttcaaaaacggatgctgctttttcaatatcttctttatatccggaaatgacaatttgctgcggtgtgttcatgttggcgatatcaatcatatccaagtgattttctcttaaaacatccgtcacctgctcatgagtcaggccgatcaccgctgccatgccgcctccttttgcgcggctcatcagttcgcccctttttttgaccaactgtaagccttcttcaaaatcaaaggcgcccgaagcgtataacgcgttatattcgcccaaactgtgtccggcggtaaaatccggtttcaagccggtttcttctgtttttttcaaataactgagggcattgacgacatagagcgccggctgagtgaattgagtctgattgagacgttctccgtcccggcacagctcctgaatggaatatccgagaatgtgatcggcctttgcggttaattcaggatagcggccgaacaggtcctcccccatccctattctttgcgagccttggcctggaaaaacaaagctgatcatcttacagtctccttccgggcggtgataaaatgctgtcttctatttgctgcaaatgtgtttgttctttatgaaacggcgtcataatggcacggatgcgttcagccgatcctgcaggaagaatctgtttggcaaatgcggccaatgttccggaaggcccggcatcaatatagaatcctttttggcggctgtctgcgaattgaagcgcttcgcggaatcgaatcggctttcttacgatatcccagaaaaagtccgcttgtatatcggtctcagcctctccggtcgcactggagatgtacggtataaacggagtccggattgatttctgagctaaaaagcgcttgtacggctgttccgcctgatcaaccagcgctgagtgaaacccgtaagataccggcaatagctgatgaggaatctgcttttctctcagatcgtccatgatctttttgatatgttcccgctctcccgagatgacaaagtgagaatgatagtttacagatgccaattcactatgttcgccgagcagcggatcatcttgatataaagccggatcacccagtatcgcaagcatgctgccgttacggcaagtttccgtaacgattcgggcctgttccagcacgcaatctaaagcatcctcggcgctcagcacgcccgacacagcggccgctgcatactctccgaggcttgctccgatcacataatcgggacgtatgcctctttgctccaaagcatatgcaagtgcgtactcagccataaaaatggcaggatggctgaaaagaaggcggtcaaatggatcagacagacgattgcctgtatgatacatctctttaaggacagagtaaccgaaacggctgactgcaaaatcgtccaagtcaagcattttctgccgaaaagcggcgttatgtgcaaacagctctttccccatttgatagtattgggaaccctgtccagaaaacatgaaaacaattggctggttcatttgttctcctttttgctctttattttttcaaaatattgatttgtgagtttttcgtgatgtcgtgtgcaggtgaagtggtcgtgatgttgtatggctggcactattgtgtgagataagaattttgacttgcgttccgctacatggcgggtgaagcttcagtttcttttttgatgcggtgaataagtcctgtcagcacatggcccggtccgacttcttcaaattccatccgccctttgtccagcagatagcggatgctgtcgttccatcgcactgaatggtcgatctgatcggccagaacggagtggattccgtcttgctcataaggtctggcatgcacattagaaatgacaggaattgatatagcagaaaaatgaaatgactgtaaaaatttttcgaactcttgttttgcttcactcatatacctcgagtgaaaagcgccgcttacgtttaacggatgaaacatcgtaacgtcttttaatccttcgaatacgcttttggctctttcaatgtcttctttgcgtccggatatgacaacttggtgaggagaattcatattggcaatatcaattgtatgtaatccgtgcgtttgaagggcgtctgacacttgagctgcagttaaccccataacagcggccatttttccgtcagtggccatactcattaattcgcctcttttacggacaagctgcaggccggtaataaaatcaaaagcacctgctgcaaacagcgcattatattctcccaaactgtggccggcaacataatccggctttatgtcattgtcttggatttttttcaaatagcttaacgcgtttacaacatataaagcaggctgggtgaactgcgtcttgtgaaggttggaatacggattctcaagacaaagccgtttcatggaatatccgagtgtttcatcagcctgctccgttaagtctttaaattcatcaaacaatgagctccccattccctgcttttgagaaccttgtccggggaataagtatgtgatcattttctcagccatcctttctcggattcagataagaagcatgttcaagttgatagtaacttcacaaaaataccatgtcaagttaatttatcctatgtgaactcctgaataatgcctatttttccctgtcgaaaggcggactcagggctttcggaacaggcgtaagcagaatgtcccatccggcctgcccggcgttctcttccgcaaactcccgttactcagccattcatcaccagaaatctagtaataacttccattccatttcagaagttccttgcctcaaaagaaaagctagttagatagaactaaattacacattacttaaaatgaaacagccctttttgattttttctgttgcggaaattcacaaaatgttcttttttttcaatctgaaagtaaatattgtttttcaaaagactctccattttttgacccggcttctccccgaaggagtgccccggatacacacgcacatgcggcggaatggaggctttgatcctctgtatactgtgaaacatatcttcagctgagctgcccctgtcctcacatataccgcacccttctgtaaacacggtgtcaccggtaaaaagatgatcagatagcaaatagcacattcccccggccgtatgtcccggggtcagtatacttctgatgataaaccctccggccgcaaaggtttggccgtcttcaagcgctattaagtttctgcaccggaattgatagaaatcgatttccgccgacgacatgtatatatcagaatgatagatttgctgaagcggctccgccaagtttacatggtcataatgcgaatgtgttaataaaatagcggataaatcaacatccaattcatgcagtttatcggttattttatcgatttcccaggacgggtccaccgctatcgcagatttttttgatcggtctgcgataatataacaatagttggaccacatctggtgataagttttgatttgatgcacttcatatgtatgatccattgtcaccattcccatttaaaagatccgggcagactgctgccgccgcccagccgactgtaaccactttaccagatgacaccacgtttttccatggattttccggtaaagttaaaaaaactttctgctcccgccaaaagcaccagtctggaccttttttacaatttgctatgctgatatataaggaaatcagaatattaatttagatgaattctttagggaattttattcagaaaatgaaggatgaatatgagtttcggataaaaagaaaacaaattgagcttttgttttgaaaagcaattgccgaagcggtcgaaggggataatcagtttttagaaatgatccgcaatcaagattattatttcaatccttttcttcaagataaactaaatcatacgggctctcgaaatatatcagaataccttagttcttacaccgaattcaacgttatgttgacattaacataattgaacttagaaaagtaaggcggaatttacactcttttcaaatcagccctagctgcaacaattcacgaaagcgtcgcgcagctttttactgtgcaaaaccaaaactaacataaaatcattaagtgtaaaaagtaaatattaatcattagacaaatagactgtgttatatgggtcggagtttactgctcaaggtaaattgccctgggatgcaaaagcactaagagcagattgggatgcaatacctgctaaagttaaagctgctatgggcggaatcggcgttttgaaataattcttaatacgatcgacaattttactggtgcagttgaagatgcgtgctatgcgggtgctctaaaagaactggcaacccaacagccgcttggcggattactaaaactcttaggcttttcatttaaacggggctattgttggtgtttaacaaatttatcctgtgttaagctttaaagtgattattttctaaagtgctaagatcggaggtaactatggaacataaaagtaatgctgaaccgagcccaaaagctataaaaattctaactttcatcattcctatagttttaataggacttatccttgttcttaagaatattaataccgcagcagcagaaatttcattttatatcgttgctatcggtgtggttctcttagtggttttcagtttgatcaaaaatagaaaaaaccgcaggaagaactaaatgtaagggggggctaattactagtcccccttgactaacttgcggatagtataacctgccaaattccaattttatttaaattccccctccatctcctccctgtgaatttggaaaagcaggtacccatctatataactcagggtagtcacctggttcttcacagataactttaagattttaaggaatcgttttctccattatttcactattaatgcagtgacatatagacggttacaccaaacacaagatgctgcgctgtcaccccaaatactatccataaacaatttttatatgaaagaaaagcagctggatgttaaacaaattattttcatgatttacggcatacagatgcaacaattataccagaaattaaaaaactcaaaagttatctctgacaggctgggtcattcaaactagtaaggctacttgtgggcaaataacggtttagtctcacataaatcattgttcttgcatcacacgcttaaacatcttctccatctcatacgtactgttatttttagttttttgacaataaaccatgattactcaaaacattgatatttcagagcttctaatagttttctgggtaaatatttttattaaattagcatggttagacataaagagagcagcctccttttttgatgataataaatatgatgatgagtggaccgagaatggttacaaaattaaatttaagcgaacccctattataaatatagcggatgtttatatatctaagaaatagtcttaactttttaatttaagggaatgaaagatatgctgactcagaaaggaaatataccgtattatacttaacatgagctaccgatgtaaaaggccagttaaagagaaaaacaggaaaaagcgaaatagatttacgtgcagttgtaaaaagtctcatgcgacaaggagaggttccgtaagacaaaatacaaaattgcatcatctaaaaaagcccaaactctaaaaagttgggcttttaatttaagcggggagaaagcgatttgtagccttaaaataaagtttgattaaatgaacttaataaaccttgataaaagtacaaatagaaaaaacgtgttttgaaaaaaagattgatcaaaacacgttttttctatattcatttcaatcatcgttttataaaaaagtttgatcattttatgtctagaatcttcaacaaacgcgcagtctgaggaatagtaccttataataaaaactgctgagtgctacctagactgaatactccacccatgtgttttaagcttttttatataatcttcaacactaattttttcaacttcaattgctaacggcgtcagtgaaacaaggcactcatttgaagtataatttattgtaacttttaccacctcgtatccattatggaaacctgaatcaaatccaggatcgtcaattatatctcctacttgagggcgaaagtcagattcaaatgttttcactaatgtttgagtattttcctctgtaggttcttgattaattgatgagacaaataatattaaatttatattcaaagcatttcccccctttctatgctgtttaaataatctttagtttaattctattgttattgatgataacaaattttaacttgcatcacaaattaattgtgccattaaatggaccgtttgttgaattctaaaaatctgtattgttaatgtgattctatcaaacttttttataaattatcggactttgttttacataatcaatctttattttaaagctacacgattaagttttttagtcctcccctgtttttcttttatttgattttactactatccccgtaatttgcacaaatggaaaaaccgcaatatgattgcggtctgctgtgaatctgtatttgaagttattcagtccgctcatcagcttgcggctttagtaagatggttaagacaattcctgataatatcaaaacatttctataaaaaaagattcggattatagaatgcttaaagacaattacctggacaaggaacaagtatctgtctttatggaggcagcaaaatcttctaaatatcatcacatgatcgctttaactcttttaaggaccggcttaagaaaaggtgaactcattgctttatattggtccgatattgactttaataacaaaactttaaggattgctaaatctaagaacgagtttggaatcatagcacctaaaacccgtaaaagtgttagaactataagcatcgatgacactttaattaaagagatgaaaaagtttaaggaatggcaagaagaaaataaaataaaacacggtgataattataaccagtctcccttttttattatcaaccataagggagatgaccttggaccgtttggaattgataaagtcatagattccttgctaaagaaaactgatctgcaccacattactccacatggtttgagacacacacacgccattatgctgctagaaagtggtgcagatatcaaatttgcaagtgagagactcggtcatacggatgtgaaaatgacagctgatgtctatatccatatcttgcagaatcacaatcaaaaaagcattaatcagtttgatgaatacctaaacagctaaaatcagtgggcaaaatgtgggcacgagagataaatccctcacagaatccttctacatcacacgcttaaacatcttctccatctcatacgtgctgtgatgaattatgatcggccggccgtgcgggcatgtgaacgggtctgtcgttcggcgcaggtcatccaagagcgctttgatttcgtcgtttcgcaaatggcggttcgctttgattgagcctttgcagctcatcataatggccgcttcctcccgcagttttttaatatcgatctgtttggcgtcaagcacctgctgaatgatttcttcaatcagttcagcttcttccccttttggaaaccaggccggatggcagcggacgatgtagctgttcgtgccgaatgcttctaaaaatactccgacgctttcaagctcatgctgatgctggtcaatgatcagcgcctcatttgccgcataatgaaaggtgagcggcacgatcatatcctgcacttcaggctcgacctgcccaactttctcccggaaatattcgtatttaatccgttcttgtgcagcatgctggtcaatgatatacaagccgttttcgttttgggctaaaatatatgtcccgtgcatttggccgatcggatacatcaccggaactctttcttcccgtatttcttcagagtcagcctcctcttcaggctccggaatatcggaaacatgcgcttccgttaccggcatgccgatcttcggcggcactccgtgacccgcttcatccggcagggactcttcttctattaccggctcaggctcttttacgaccgaactcagcttcatcggtgagtaagacggctccggcgttttttcaggaagtttccgctcaggcgcgctttcctcgaatgtcataaattgctgttcgtttttggccggtgccggcgcggattttttcgggagctgggcgctcggaataagccgctgcttttgaaacacttcctttatcccgtcacggatcagctcatgcagctccgtctctttgctgaggcggacttcaagcttcgagggatggacattgacatcgaccaaaatcgggtccatcgtaatttcgataaacgtaatcggatggcggccgatcggcagtagtgtgtgatagccctcatgcaccgcttttacaagcgggaaattcttaatgtatcttccgttaatgacagatgacatgtagtttctggatgcacgcgtgatttccggaagcgcaatgtagcccttgacttcaaaatcaagcgagctgacatggagcggtatcatttttttcgcaaccgccgtcccgtaaattgcggccagcacatggcgcacgtccccgttaccgtttgtctgcagcagatttttcccctgatggcggagacggatcgatacttccggatgcgcaagagcgatccggttgacaacatccgtaatattgccgagctccgtatgcacggttttcatatatttcaatctggcgggtgtattgaaaaacaggttggtaacgataatctccgttccttttctgctggaggatttctgctcagaaatgatattcccgccctgaagaatgagatgggttcccgctccctcgccgatgctcgttttgatttccagatgagaaacagacgcgatacttggcaaagcttctccgcggaaaccgagtgttctcacccggaacaggtcgttttcatctttgattttactggtcgcgtggcggcggaaagcccgcttgcaatcatcggtttccatcccttcgccgttatcgagcacccgaatcgacgaaagccccgcttcctctatgtcgatttcaatgactgtgctgtttgcgtcgatggcgttttccaccaattctttaacgactgaggcaggccgttcgaccacctcgccggccgctattttattcgagagttcatctgacagctggatgacttttgccaagtccgtcacctctttctattttaattttttttgcagcttgtacatttcattcatcgcctcaagcggcgtcatatcgagaatattgattgacttaaaagcttcaagcacttgtttttctttattagaaacagccggtgccttctgttctttttcaccgtcagcaaaaaaggacagctgtgccggttcttctctgacggcggactttttctcagataccgccggaagctccggtttatctcccgtctgctcaagctgtttcaaaatctcctgcgcgcggctgatcagatcgtccgggagctcggcaagctgggcgacatgaatgccgtaacttttatctgcggctccttctttgatttgatggagaaacacgaccgttccgttatattcctctgcgcgcacatgaacatttttcagctgaggaagcttatcttcaagcaccgtcagctcatgataatgcgtgctgaacagtgttttagcgccgatatgatcatggacatactcaataattgcctgtgccagcgccattccgtcgtacgttgatgtcccgcggccgatttcatcaaacaggatcaggctgtcttttgtggcgttcacaatcgcgtttttcgcttccagcatttccaccataaaggtgctttgtccggaaatcaaatcatccgctgccccgattctcgtgaagatttgatcaaaaatcggcagaaccgcttcttttgcgggcacaaaacagccgatctgagccatgatcgatagaagtgcgatctgtctcatatacgtgcttttacctgacatattcggacccgtaatcaggagcatttcccgcgaatcgcccatcaggcagttgttcgggacgtattcttgactgtccatcaccttttcaacgacggggtgtctcccttcaatgacttttacttcattatcagaaaagacgggctttgtgtaatgcctgttttcactgatcgtagcaaagcattgcagtgcgtccagctcactcatttgtttggcaagacgctgcagacgcggaataaattgtttcaccttttcacgcagtccggcaaaaagctcatattccagctcgcagatgttgttttccgcttctaaaataagcgcttctttttccttcaattccggcgtaatgtaccgttcggcgtttgtgagggtctgcttccgctcataccgtccgtcctcaagcagatgaaggtttgcttttgtgacttcaatataatagccgaacactttattgaaaccgacctttaatgaacggatgcccgtataagcgcgttcctgctgctccagtctggcaatccagtctttaccgtttttgctggcgtcacggtactcatcgagcttctgatgatagccgtctttaattaaattgccttcttttaacgataacggcgggttttcatgaagggcttcttctaacaggtcaagcaaatctccgcacggatcaatcaagccggcgcgttcttttgcttttttatggttaagagaccctacaagctctttgatgctcggcacttgttttaaagattctttcagctggattaaatcccttgcgttgacgtttccgaatgcgacccggcccgccagacgttctaaatcgtatacttccttcaggcgctctcgcagatcttcacgctcaaacagatgattgatcagcgtctcgaccatttcctggcgttcttcgatttgggatgccctgatcagcgggcggtcaatccattgtttgagaagccggccgcccatcgctgttttcgtctcgtctaaaagccaaagcaatgacccttttttgcttttagaacggatcgtttccgtcagctcaagattccgttttgaatacaggtcaattttcatcgcttcttccaattcatatacttgaaccggctgcaggtgatccaggctccgtttttgcgttttctgcaaatacgtatataaacgcataaacgtctctgtcagctcttcgcccggcaagtgctttgcgatttcaatgcgttctgttatttccccgtcttcgatggaaatcgtggcgccgcaccgttctttcagctgagcagctgtatgttcgttaaacttgctcgatacgacaatttcctttgcgccgactgagtaaatttctgacatgacatcttcaatccgctcaataaatacggccaggttttctccggtcgttaagtccgataaagcgagaccgtatccgtcacgaaattcggaaacggaagcgataaagttgttttccgactcgtggatgccttttccatccatcacggttcccggtgtgatcagctggacgacttctctttttacaacgcctttagccgccttcggatcttccgtctgttcacagatcgccactttatagccctttttaatcagctgttcaatataagccgccgcggaatgataaggcacgccgcacatcggaattttatcagccgaacctccgtctctgcttgtcagtgtaatttcaagctcttgtgacgctttttttgcatcttcaaaaaacatttcataaaagtcaccaagccgaaaaaataaaaaggcatcttggtgctctgcctttatcttcaagtattgctgtatcataggcgtgtaactagccatcatttaatccctcactatgtatcttctcttatccgaatcccattataacataaacaaaagagtgatatctttatatataaaaaagagacttggggtgttaaactcccctagcctcaacttattcttcaggatctccgactaaaaattcagggttaatgtcctctaattcttcatcaagatcgtcttcccaatcatcatcatcgtcttcttcccagtcaggattgacttcgacgacgactttcgtttcaccgaccacttctgctaaaaattctctctctgcctgaaccacgattttatttccgttaggagaaatggtgacttcaagacaattcggctgctgcagcactttggcaatgacttcgtgttcgtcatctaagtaatttgtgtctctgtatctgagtttaatcacatcgacatactttactctctcggttacaacttccgtttttgtattatcggcgtaagagtaccagacgtttatatcataatacccttcaatttctacagtcttcccgatcttttcggcatcgtacttgtggttgataatccagccgcccaatatacttgacggtttttctccaggtgagatcgtgttggtgcattgggtgaattttcttcctttcgcaactaccgctttcgtaataatttccctgtattcagacattccggcaggcctccttgttcttcttcgtgttatcttatgctgggcatttgtctcatgtgcatttttataataaaaatataaaaatacaaagtttctgtttcattgtatgcagccctgcccagaaactttacttttaagtatgataaaactttccagtaaaatgggacaaaacggtgagtcaatgaaaatttagtacatattacaattagttctcaaacagcaaaaaaacacgggccgatgaaggccccgtgtttaaatagaacagctgttattcgaatgttttacttttgaaccggtttctcccgtcagcaggttgcctccggtagatgtaatgatttcgtttgtcacctgatttgagatcgtatgtgcgacaagctgaagaaggtcattgacctcaatctgggaatctctgaattcttgaatgatcggaatcccttcaagttcttcctgcagggcgtcaattttactttccacttgtttcagcgcttcaagcttttcgtagtgcttcaggttaacggcttgcttttgcagagttttaatctgattaataatcgcggagactttttcattttcgttaatctgcgcctcggcgcgtttgaaaaaatcaacttcttctgtttcagaaatcattttcgcaaggttcctagcctgctgtacaatgtctttctttgagtaaagcgtcattattatttcacctcgattgcttctcctgccatcacaccgtcaagcgaccatgttttcgcctgttcgattttgacgcgtacaatcttgccgatggcgtctttcggccctttgaagttgacgagcttgcttttttccgtatagccggcaagaatgtcagggttatttttgctttctccctcaactaatacttcgacagtcctgccttcatattccttcatttttttggctgaaatttctttcaccaaatcattgaggcgctgaagacgttctttcttgaccctcatcggaacattgtctttcatcttcgctgccggcgtgccttcacgaggagagtaaataaacgtatatgcgctgtcaaattccacttcgcgatataacgaaagcgtttcttcaaattgttcatcggtttcattcggaaaaccgacaataatatcggtcgtcagtgaagcgttcggcatcgccgctttaatttttccgacaagctccagatagcgttctctgtcatatttgcgcgccatcatttttaacatcgctgagcttcctgattgaaccggaagatggatatggtcaagaaggttgccgcctttggcgagcacttcgatcagatgatcatcaaagtcacgcggatgactcgtcgtgaatcggattctcggaatatcaattttacgcagttcgtccattaaatcaccgagtccgtacgtcatatcctcaaaatcttttccgtacgcattcacgttttgaccgagcagtgtgatttctttatagccttcgcttgcaagtcttctgacttcctggataatttcctcaggacggcggcttcgttcttttccgcgggtatacggtacgatgcagtatgtgcagaacttgtcacagccgtacataatgttgacccagcctttaatttttccgttgcggactttcggaaggttttcaatgacatccccttccttcgaccacacttcaatgaccatctcttttgataaatatgcctctgataacagttccggcagacggtgaatgttgtgcgtgccgaaaatcatatcgacaaacgggtgcttcttaaggatgcggtttacgactgattcttcctgtgacatgcagccgcagacgccgagaatcaagtccgggttattttttttgagcgcctttaaatggccgagctcgccgaacactttgttttcagcattttcccggatagcgcaagtgtttaataaaataacgttcgcgtcatcaaccgaatttgtcgcttcataaccgagcgccataaaaatacccgccatgacttccgtatcatgctcgttcatttggcatccgtacgtgcggatataaaatttcctgccttcaccgaggcctttaaattcttctgagattttaaaatcgttatgatattgaacggattctttgccccgttttttcgcatcttttaaagaaggcggaatatatacggcttcaaaatacttgctgtaatccttttcggattttttgtccgccggattcacttgtccgctttcctgcttttgcttttcattcatgttcgaatgtctcctttcaaccgaaacttccaccctcaagtatactggttaaaagcgtttgacacaaccgccagcctattattgtacaccttattgagaataagaatcaataagaaataaaaaagagggaatcatttcccccttacacaagctgcagctcttttgcggctgaacggattacttccagggcccggtcaagctcctcttttgtatgctccgccgtaataatggtgcggattctcgcttttccttgggcgaccgtcggatacacgatgctttgtgcaaagacgccgcgggtcaataaaaggtctgataatgcctgggctttttcttcctcccctattaatatcggcacgatcggtgtttcgctttttgtgagggtcagccccatttgaaccagtttgtctttgaaatacgccgtgttctcccatagcttttccatatgctccggctcttccagcaggacgtcaatggcttctatgcatgcggccgttaccgcaggcggatgagaagtgctgaataagaaaggacgccctttatggcgcaggtaatcgatcagaacctgcgaccctgcggcataaccgccaagcactccgatggctttgcttaatgtgcccacctgtatgtggactcttccgtcaagcccgaagtgattaaccgttccccttccgttttttccgagtacgccggaagcatgcgcgtcgtcgaccatcacaaaggcatcgtacgcctctgcaagtttgacgatgtcaggcaaaggagcgatgttgccgtccattgagaatacgccgtcggtgacgatcaggcgcatgcggtaattcattgattttttcagcaccctttccaaatcgtccatatcaacatggcggtacacctttttatctgctttcgtcagcctgatcccgtcaatgatggaagcatggttcagttcgtcagagatcacgatatcttcttttgtaagaatgcttgataagacgccctgattcgttgtgaaccccgattgaaaaacaagtgccgcttctgtttttttaaagtttgccaattttttctccagctcattgtgcattgtgaatgttccggcgattgtccggacggaccccgtacccgctccgaattcttccgcggcgcgtttggccgcttcgacaagccttggatgcgacgtcaaaccgagataattgttcgatgaaagctgtatcacgttttcccctttgacttgcaccgacggaccctgcttcgtttcaatttgtttcatttgctgccacgttttattttctttcattttatcaagctctgcttttagaaattcaaattctttcattatagaaccctccccttatggaatcaaaatgactttgccgcactggccctttctcatcaggtcaaaccctttttcaaagtcttcaagcggaaactgatgcgtgatcaccggcgtcagatcaacaaggccggattcaagcaggtgcgatacctgccgccatgtttcaaacatttttctgcctgtgatgccttggacggtaagtcctttaaacaccacgtcatttgtcaggtcaaccgtcaccggacgttccggcagactcagcatgtggaaccttcccccgttggccgccatctttaatccttgtgctatagctgccgggtggcctgacatttcgcagacaaggtcgatcccttctccgcctgttaaggtgtcgatcacctcaagcggatcttccttatcagctgaaatggtgatcgtggctcccaatttcttcgcaagagccagcctgtaatcatttttatcaatggccgcaatacaggatgcaccggccgctttagccactgccaccgccatcagcccgatcggtccgcagccgataattgcagcggaaccgcccgcaagctggctgctttccagcaccgtatgcaccgcgttgccaagcggctcttgaacagaagcgacggcggggtccatatcagcgggatttttccaaacatttcgagccggcactttgacatattcagcgaaggaaccggctgtatctacgccgaggatctttgtatgggtgcacacatgatgttttcctgttaaacaagggacacaagtaccgcagacgaagtgggtttcagccgaaacgtagtcacctattttgacatttgtgacgtgcttgcccgtttccgctacgataccgctgaattcatgtccgaatacttgaggtgttttgattcgtttctgagcccattgatcccaattataaatatgcacatctgtaccgcatatagatgcggcctgtactttaatgagaacttcattctcattaatggaaggtatgggaatttctttcagagttgctccgaaagcgttttcatttttgacgatagctttcatctttcctcccaacatgtacactcctcctcgaaaaaacactgtaataactggattgtaacatgagataaaaaggaggtaaataccagtgtccactccatgaaaacaactgcttccgtccggaaaaatgggcgggattttttttgaatattatatgaataaagccatttatcatctcttcgtactattaatataatattgtgagaaaatatgacaacaataaaaacaacccgctcgccttacgcaagcaggttgagaatatcatgtttttgtttttaacggggttcgacgattaacttaatcgccgttctttcttctccgtcaatctgtatatctgtaaaagccggaatacaaatcaaatctacgccgcttggcgcgacaaagcctctggcaatcgcaaccgctttaacagcctggtttaaggcacccgccccaattgcttgaatttcggcggctccgcgttccctcaatacaccggcaagcgcgcctgctactgaatttggacttgattttgctgaaacttttaagatttccatttctgctcccccttagttttacaatggataagtgagtgttcattagaacaatcattattagatgttgctatccaaaaagccatccccacaatgcttttcaaaaatagcgggctaccttccatttctactatattcactaagaagttgctatattcctgcttttccttttaatatttttataaaataaacacatgatcacctattcaaagaacatatggtcatcattgattaatatccgttcgatatttacggcctttttcgtttgatcgtcgatgtcaatgagcactccgctcagtgtagttttaccttccgccaccgtaaaccggacgggaagattggttttaaaccgcttgatgaccgtttctctgtccataccgagaattccgtcgtacggacccgtcatgcctacatcagtaatatatgccgttcctttcggcaaaatgcggttatctgccgtttgcacgtgtgtatgggtgcctaccacggcagaggctcttccgtctgtgtaccagccgatcgcaattttttcgcttgtcgcttcggcgtgaaaatcaataaaaatgtacggcgtgcgctttttcgcttcttctattaattcatccgctttagcaaacggatcatcaagcggcggaagaaacgtccgcccctgtaaattaatgacggcaagctcttttccgttcgatttaatataagtaatgcctttgcccggcgtaccttccgggaaattcgccggccggacaagatgcggcacatcatcaataaagtcgaagatctctcttttatcccacgtatggtttcccattgtaatggcatctgctcccgcttccatcaggctgtggtagatcttttctgtcagtccttttccatgtgctgcattttctccgttaataattgtaaaatgcggtttatgtttcgctttcagtttcgggacatattcttttaccatgtcgcggcccggggaaccgacaacatctccgataaataaaattctcatacattccattccttccttttcagggactcaaaaaaataaagtgatgcgctaagcatcactttattttgcatactctacggctcgagtttctctgattacggtcactttaatgtggcccggataatcaagctcgtcctcaattcgtttacggatatcacgtgccaaacgatgggcttctaaatcattaatggagtccggcttcaccatgatgcgaacttcacggccggcctgaatcgcaaatgatttttcaacaccttcgtaagactcggagatttcttcaagcttttcaagtctgcggatatagttttcgagcgtttcacttctcgcacccggtcttgcggctgacagtgcatcagcggcagcaaccagaacggcgataatggaagtcggctcttcgtctccgtggtgtgacgcaatactgttaatgacgactggatgctctttatatttggtcgcaagctccactccgatttccacgtggcttccttccacttcatggtcaattgcttttccgatgtcatgcagaagaccggcccgcttggcaagctttgcatcttctccaagctcggaagccattaaacctgctaaaaacgcaacttccatagaatgtttcagtacgttctgcccgtagcttgtacggaatttcaaccggccgaggatcttgatcagatccgggtggaggccgtgaacgccgacttcaaacgtcgtctgctcacccatttcccggatatagtcatctacctcacggcgggatttttcaaccatttcttcaatgcgcgccgggtgaatacggccatcctgaacgagtttatcaagagcgattcttgccgtctcccgtctgatcggatcaaatccggaaagaatgactgcttcaggtgtgtcatcaataatcaggtcaatacctgtaagcgtttcaagcgtacgaatgttacgcccttcacggccgatgatacgtcctttcatctcatcattcggaagattgacgaccgataccgtcgtttcggcaacatgatctgctgcacagcgctgcaaagcaagcgacagaatgtttttcgcctttttatctgcctcttctttcgcacggttttcggtttcttttgtcatgatggcgatgtcatgtgaaagctcattttcaacccggtcaagaatgatttgtttcgcttcatcccgtgtcaggctcgaaatgcgttcgagttctgactgctgcatacgaatcatctcatccactttgctttccatctcttcaatatgttgttgtcgttcattcagagaatgatctttcttctccaacatcgcttcccgtttatcaattccttcatgtttacggtcaagattttcttctttttgaagtaaacggttttcttgtttttgaagctcatttcgtctttcacgaacttcctgttcagcatctattcgaagtgtatggatttcgtcctttgcttcaagcagagcttcttttttcagtgcttcagcatcacgctttgcatcttcaaggatttgctcggcagcaccgcgtgcgcccgcaatctttgcttcggcaatggttttacgaacatagtagccaacaactaaaccgagcagagtcagcaaaatggagatgagaaccgtcattggggtcatactttcacctcctcttgctatgaacttggtttttgcttaaataagtgccggcatgtacattgtctgattttctcaacatacagaaccttcacagggaatgagtctctcacgcccttgtcaagtttaaatggtttaacaatcatgttaaaaaaacaaatgttacaacttcattgtaattgtgtcggaaatacttgtcaagcttgccagcttaacgattcgccttcagctcggatcttcgcccatgtatatatcataccatacctagatccgcttttcgtgaatgacggctctgttagtccggctggttaagcaattggtaaattctattgtttacctgtcctaatttggcgttattctgaatgtttgacagtaatatgacatatttgcttgccgaatggctgaagctgttcaaaatgttgtaaccgggcataacaccgtgattggaatagcttcccggatcaatgtaaaaccccatgccgtaagcggcactgcttcctgctgtaaacatttttgtgaagctttcttttgaaaggagcgtgccgtttacgatcgctttatcaaatttatagagatcttcagcgctcatatacatgtcgcccgccccgtacagctgcgataagtccaaaaggtgcggcgttacaagactgccgctctcatcgactttgtagccgacggcaggatatttggctttggcaaatgttttgtaaaatccggcatgcttcattccggccggtttgaacacgtgttcttttatatattgttcataagactccccgctgacttgagatacgatataagcaagcactgaatagttggaatccctgtaatcccaaaccccgggctgccgtttaattccgcggtattctatatccttgattaaatcaattggagaaatcggtccctgtccctcaatatgcccgtttatgccggacgtatgattgagcaggtttttcaatgtaatgcgcgtgccgttaggaaaattcggcaagtatgtactgacggggtcactcgtctgcagcagccctttttcttcaagctgcaggacagccgtcgcgattaacgctttttgtgaagaaccgatataatatgatgtctccggattgtttttaattttttgttttcggtccgcatagccaaagccttttttcagcacaacttttccatcttttacgatcattgctgtgccgctgaacccgatctgttgcaagtaattgctgatctgtttattgtgatcgattgatttaggtgttttctctttttgcgtcttttcttttttctgttgagtctggtcttttgaagtatcagattgagcggcgggagcgtttttaacggattccttctcccggtgatgcgctgtgacggtccagatcataataaaaacagtgacaagcagcagaaaaagaaacagccctcccgttttcatcagcttcttctttctttttttatttattcttgtgcggcgggggctcgtcatcttttttcctcctcagatataatttcaactttcgccatgatgttagacgagtaaagggtgaaaaaagttgtaacattccagataaaattttccgaaacagccagtgtttttttgaaacacacaaaaaaagagcggaaattgcttattccgctcttttgatcgtgtttttattcttctaattccatctcttcctgaacttcttccgctttgtccgttacaccgttattgtctaaaccgtaatattcacggatttgttcctgaatcatcagcatgatgtctttattttcttttaagaactgcttggcgttttcacggccctgaccgagacgttcttcttcataagaataccacgaaccgcttttttgcacgatatccagttcagttccaaggtcgatgatttccccttctttggagattccttcaccgtacataatgtccacttcagccgtacggaacggaggagcgactttgttttttacgactttaattctcgttttattccccatcacgtcgttgccctgctttaattgctcggcacggcgcacttcaaggcgcacggaagaatagaatttcagcgcacggccgcccggtgtcgtctccggatttccgaacataacgccgactttttcacgaatctggttaataaagattgcgattgttttagatttattgatggcgccggaaagctttcggagcgcctgagacatgagacgcgcctgtaaaccgacgtgtgaatcacccatgtcaccttcaatttcagcttttggaacaagcgccgcaacagagtcaacgactacgatatcaacagctccgcttcgcaccagcgcttcagcaatctctagcgcctgctctcccgtatccggctgagaaagcagaagctcttcgatattgacaccgagcttttgcgcgtaaacaggatcaagagcatgctcagcatcaataaatgctgcctgtccgcctttttcctgaacctcagcgattgcgtgaagcgctacagtcgttttacctgagctttcaggtccgtatacttcaataatccgtccgcgcgggtatccgcctattccgagagcggtatcaagtgcaagggaaccgcttggcaccgttgaaattcttgtatccgttttttctccgagcttcatgatggaacctttgccgaattgtttttctatttgcttaagagccatatctaaggctgcctgacgatcactcatttattttttcctcctttatcttgccactacatatactataccttgtttactggcatttgccaagaaaaaagcgaacgcatattcggattttttccgcgttcgcttttctgcaaaagagcataatttcccttataaaacttaaaaatcagagaaaacggctctttaaaactttatttttgatccagcatttttaaaatgagatggcagccgtatttagcggcgcgctttctgatcccggttcttgagccggcaaagttaaattcgtgcacctcttcttttccttccgctgaaatgccgataaagacgcggcccggcgcatgcccttcctgcgggtcgggacccgcaaccccggtaaagctgatgccgatatcgcttccggtcagctttctcacaccggctgcaagctctttcgcacactctttgctgaccgctccgctttctgcgagcgtctcagctttcacgccgagcacatgctgtttcacgctgtcggaatagcagacaacgccccctgcaaatagttgagacgcaccgcttaaatcagtcacccactctgaaaacaggccgcctgtaaagctttcggcagaagaaatcgtaattccgttttgtctgcatgcttttgaaagctccttcaccagagacgtatcatcatatccgtagaaaaattcaccgacacgttctaaaatggcggcttccgtttcttttaaaagccgttctgtttctttttcgtcggcatgtttcgccgttaaacgcagcgtgacctctccgtcagcagcgagcggggcaatcgtcgggttcgtctgcgcatcaatgatatcttctaaatcagcttcaagctgggattcaccgattccgaaaaaccgcagcacggttgaaacgattttctcattagaaccgagctttttaagaagcagcggcttcgcttcattttcaaacatcggacgcagctcgctcggcggcccgggaagcagcatataaagccttgagccgtgctctgcaagcattcccggcgccatgccgaaatgattcgccaaaacgtctgagccctcaatgacgagcgcctgtttgcggttattcggcgacatggtccgttttgttttcgcgaaatattcttcgatcgaccggaacgcttcgtcattcagaacgagcgggcgccccagtgtgtttgcaatggtttctttcgtcaaatcgtccttggtcggtccgaggccgcctgaaaaaataatcaggtctgagcgctcttcggcaatgcggatgacttgcttaagccgctccggattgtcaccgacagcggtatgataaaacacgtttacaccgatttccgccagctctttactgataaactgcgcgttcgtattggcgatctggccgagcagaagctccgagccgactgcaatgatttctgctttttttgctatttccatctttaagtccttctttcttagttagatgtttttaacgcatcccagttcttcgcaaaataatcccagccggaaatgactgtgaagagcacggccacccataaagcgatatcgccgaacgggaaagaaacgagctcaaacggaagattatgcagcaaaagcgcggcaacagcgatgatctgagcccatgttttaattttccccagcatattggcggctacaacttcccccgttcccgccagcacaagtcttaatcccgttacggcaaattcgcggctgatgatgatgatgaccatccacgccggcgcaaggtcaaactgcacaagcgtaattaatgccgcggacaccagcagtttgtcagccagcggatctaaaaatttcccgaaatttgtcacgaggttcagttttctggcgtagtagccatccacccagtcagtcgttgatgcgataatgaacaaaacagctcccgtaagatgcgcgaccggaatcgattcatcccctatatgaacgctgccccactgaaaaggaacaagcatgataatcataaatacaggaattaaagcgattcttgccagtgtgattttattcggtaagttaaacataaagcccctccaatatatgtactcggacgtgaagaaaaagtcatcttaatcgttcagatgacttttccccttttattttttcatcttgattgtgatggtctgcgccatcacatcatgcggattgagttcataggacagaacctctccgttgattttaattttcaggttaggggcatagcccgtgcggatttcaatctgcttttgatccgtgacgtcttttttaaaggtttcgcctttttgcagcgttccttcttttaaagaaccgccgctgtcatcacggacgcggatccatgcgctgtcagaagcaatcagttcaagcttatacttatctgccccggagacgttgtatgaagaagccgagccttccgttccggccgctttgatctccgtcttttcactgcttttttctttcttctgctctgacgcttttgtgtcctttttgtcttttttgctgtcagattgcgcttcgtcatttgtattgccgtcgtttttcagcgcagaatccttaggaatctcatacttgctctcactttgggtgactgccttatctccatctgtctgcccggatttgctcattccgagctgaataatcgcataaatgatcgcgatgacgataatgacaccgatgacgacaaggacggtcggaagccattccgccgcctttgaagcggacttaggaagctccctttgcatggcgagaccggagattttttccgacacatcgtcatggtacgtgttagggatgtcttttttatattcttcaaataactgatctgaatcaagcccgacagcttcagcgtattgcttgataaacgcccgcacataaaaattgccgggaatgacgtcataattgccttcttccagagcggttaagtatcttttctgaattttcgtcgccgcctggagttcatccaatgacatccctttttcctctctggcttctttaagccggattgctaattctgtcacaacaaacaccttccaatattaaaagtcaaagcttgaaaaaccggtctgatcaaatatttgcggttcttctgcatgttcatatgtaataacttcgtcaggatcatttctgagttcgataatataatcgaaatcatcgagcgtatactccgaattttgaacaaaaatatcggggtgctccacgacctttgtcgccggaagccgcataatttcactgacgagctgaagatggcgctcagatccccgtcttgtcgaaacgatgccgtcgaggataaacacgttttccgtgctgtattcatcggcaaccagctggctccggatcgtttgttttagcagcgttgatgatacgaaaagccatcttttgctggcacaaacgcttgacgcaacgatggactccgtttttccgaccctcggcattccccggattccgatcagtttgtgtccttcttttttaaacagctcggccataaagtcaaccagaagaccgagctcgtccctttcaaaacggaaggtttttttgtcatcggcatcacgctgaatgtatcttccgtggcggactgcgagacggtcgcgaagcctcggttctctcagcttcgttactttaatggtctccattgtttttaaaattgattccaatcgtttaatttgatctatatgccggcatctgagcagcattccccttctggaaaggtcgacaccgttaattgtgacaatattaattgacagcatcccgagaagagatgaaatatccccgagcaggccggggcggttcacttgaatttcatattcaaaataccattcgagctttgccaaatgatataccccctccattgtggcaaatttttaccttcctttatcataaaacatttttctctaattagaaagaagaatgttgctctatagaggaaaacataaaaaaagagaggagaaatcccccctcttaatgagtgctgttattttcaacaagcttcaccatcatatttgcgatggcgcgctgttcatcttcagaagcaacgctccaaagatcagcaagcactttttcctgatggtttttcgagtcgacttcgttcgcaaggtaaccgccgatttctgtagcgaggtcagtgatcgtttcatcactcatccctttttcctgcgcatagttcaatctgtcgccaaggaaattcttccaattatcccagttttctaatactgacatgttgggttcctccatttcatctgttgttacaaaattattttgtccgtacagatgcaaactatacacacatttttttcagcagtgccagccgccgtttacggataatatatgccccgtaatataggaagccttgtccgataataaaaaggccgccgcttcggcgatttcctccggctttgccagccggcccgcgggaatttcctctgccaacgcttctttttcatcagacgtgaactgatcaagcatatttgtatcaacggcacccggcgagactgcattcacgcggacgccgctcggagcaagctctttggcaagcgctttgacgaacgaatgctgcgctcccttgaccatgctgtataatacctcgcacgatgcgcctgtttctccccagacggaaccgatcgcgacgatgcccccgctttttttccggatcatgccgggcatcagattacgcgccaaaagaaacggactcgttacatgcagctgcaccatctcccgcgccgtgtcatccgtaacgtccgtaatcaggccgaaatgacttttgccgctgtttaataccagagcatccacaggctgcttaacggaacggctgagtgtctccgcgccatccggtgaggacaaatccgcctgaataacggaggcttttacgccgaatgatgcgctcagcctttccgcaagcctgtgtgcggcttccttattagaatgataatgcaagaggacgtcatatccgttttttgcgaggacttcacttatactttgtccgattccgccgcttgctccggttacgagcgctgtctgtttcatcaatcaatactccttctttccccagaaaaacatccctcagggcgtgagggatgtttttgttatgattttggcacgactttgcagactgtcagcctgtcttctgatatttcttcttcaatgacccgctttacgtcatccagcgtaatctgctccagtacggttacgacatcaaacagactcatatctaaaaaggcgtagcgtgtgaattggttggcgatatattcaggcgaattgagcgcttttaagaatgacccgatcttcttttttctcgcaagatcaagtttttccgcagtcacggctgattccgcatcaagcagcatgtgttttaattcgtcagcgagcttatccggctccggtgtatctcctccgacagaggcaaaaccgaatccgtattcagccgtgtaatcgaagctgaaggtctcatcaatgtagcctttgtcgtacaagtcaccgtaatgcggtgagctttttccgaagagacattcaagcatgaggttcatgctgagctcgtgctttaacagcccccgccccgttttataagggtctttcgcctttaaaccgacaagacattttgagccttgcacgttcatttttaattcctgctcccggcggaaaaccgcttcctgctcctgaacttcttcacgtttgatttcgggctggtctgtaaacggctttttctcctggtttttccgcacctggctgatgaccgcttcaggatctacgggaccgacgataaagagcagcatattgctcgggtgataaaacgtttcgtagcactcatacagcagatctttcgtaatacgagagatgctctccaccgttccggcaatgtcaattttcacggggtggtctttatacatattttcgataaggccgaaaaacagccgccaatccggattatcatcatacatattgatttcctggccgatgatgcctttttctttttcaactgatttttccgtaaaatacgggtcctgaacaaagtctacgagtgtttccaggtttttctccacattagaagtactggagaacagataagcggttcgtgtaaatgatgtaaaggcatttgccgacgccccctgcttactaaagtcctgaaacacgtcgccgtccgctttttcaaacagtttatgctccagaaaatgcgcgattccgtcagggacgtgtaccatttcttccttatttaaaggaacgaattgattgtcaatggaaccgtactttgtcgtaaacacggcgtatgttttattaaagccctgtttcggcagcacatagacatcaaggccgtttgccattttttcatgatacagcgtttcctgaagctgttcgaagtttatcggtttagtcaagatgctccccccgtcccttttaagaaataagtcgtatccagcttaatgttctttccgacattgataatgtcctcttttgtcactttctcgatattgtcaaggaatctttcgatcggtatctctacttgggctgaggcctgctgatacagaaattccgctaagccgtatgccgtatcaatggtttctaatacttgatttttaataacggctttcgtttgggcgatatcatcttctgaaaagtcaccgttttgcatagcctgaaactgttcttcaatgatggtgacggcctgcttgtaatttttcacctcaatgcccgacatgaccatcaaaagccctttgaaactttccacccttgaggctgcataataggcgaggctagctttttcacggacatttataaacagctttgaatgagagaaacccccgaacagcccgttaaacacctgcaatgccggataatccggatctgtatatgtcgtattggtccggaatccgatattcagcttgccctgcttgacgtcctcttcatcaatgacttccttcggatcgggctgttcattcgccgcgcttctttcaaaaggctgcagctcccgttcttccgttttaaaatacgtatcaacggccgttttcacctgatctgtatcaacatcgccgatgacgtacaggtccagctgatcttcgcgtatggctttttgataggcttcatacaaatcttgcggtgtaatgtgttcaacatcatcgaactcgccgttgacgtgaagggcatacggttcgcttttgcacatttcctgaacgagacgcagattagaatatctcatcttatcatcatatacggcttgaatccgctgtttcagcgtccgtttttcctgcgtgacataaaggggcaggaaggcgccgttttccaaagcgggcgaaaagacaagctctgataaaagctgaaggcctttttccaataacggtgtgcggtccttcagatacttttcattaggaatctcaagcctgaacgtaatgacatgacgttctcccttttttgtcagatcagctgaaacggatgtgccgtacagctcatcaaaataagaccgcagatcagcggttttcgggcggctttctgttccgcgcagaagcacatgcggaaacagcgctctttttgttacgagctctttcgttaaaggagccagcattttaaacgtcagcgaaacggttttaaatttctcggtctttacgatgtgggcggtgatcccgccgtgctttgacttcatttcatttacgtaagtcatgtgaaacctccttcgttcattctttcatagtatgtattatgaccaaatttcagcattcgcaaaaaagagtgcgcagatgtaattatatcaactggaggatttataaggaaacaaaaaaacctctgcccgaaaacaggcagaggcattgagcgttattttttcaaattgaaaggccaccagttggctcttccgaatattttcaccatgaccggtacaaaaaacggaaggacgacaattgcgtacatgagaaggcctgttaataccacggttgcaatctgtaataaggaaagaacgcctgacggcagcatggccgcaaaggttcccgctaaaataatggctgcagaaatgatgacggaacccatatttttcatactgctgatcattgcgggttccgttccttcttttttaagctcattaaagcggtccattaaaaagatggaataatccacgcctagagccatcaaaatgacaaagccgaagaacggcacggcccagtttacgcccggatacccgaagaagtgtgtaaagatgtattccgtcacgccgatggatgcgaaatacgtcagtacgagcgacgccactaaataaacaggcataatgagggagcgcagcatcacgatgagaatcagaaaaattcccgccagcataaacatggccgtccgtttgaagtctgaagccgatacttccttcagatcggcattcatgctggagactcccgaaacgccgaaggaagcattcttcagatccgtgttcggaatggccctttttacgctcgctttgatcgcttgaatatcttgaatggccgtatttgagtaaggattgtgatcaagaacgacggtcaattctgtcgtttttctgtcatctgacatgtacgtattaaacacgcttgtgaaatcactgtttgtcaacgcgtctttcggcacaaaccagcctgtcatttctttgtctgacgccttgtgaagctcacccaggtaatcattcgcccccatcatgccgcttgatactttcttaagcccttttacactgtcgttaaggccggaagaaagttcgctgagccgggaagaaaaatcaccaagaccgctcttcatttttttctggccctcggcgagctgtcctgccgccgattcaaggcgcggcatttgtcccgcgagagccccctgtccgtctgacacttgctgcagaccgttttcaatactggtcagaccattgatcattgcgttaatttgagtgtcaatcttcttctgagcggctgccagtcgggcaaattgtttttccgcttgctgcagatgagccttttgactgtcgacctgtttagaaaaagcttctgcatccgcgtttgccttggaaacggctgactgtacacccgtaaaggccgatttgatttcttggtaagagggatcggttttgactgacggtattgacgcttccaattttgcaaacggcagccgggcaagctgcttgttcaaatcggcaagctgtctgctggcttcatctttcatcggcaggacggtttttaccaattttaaagcgttttgcgtttctgaagcgagaccgctgttttgtttgagctgtgaagtcagcatttgtttttgctcttcaatccgctttctcatctgggcgacgccggctttattctcgttcacgccagcctgcagtttattcaggttttctcctatatcagaaagcccggatttcagagacaatgttccgtcaataagctgattgacgcttttgcccgactcttcgatctgcggctgtgaatcagctaacgactttgcggcatgccctaatccgtccgtgattttttcaagtcctgtattgcctttatcaagcccttcttgaagctgctttgcctgatttgtgacaaataattgattcaatccgtttccagcggggcgcgtggcgcttctgaccgtttttacaccctctgttttttcaagttctctgctgattttttcgatatcaatcaggtgtttttcggtatttaatgtctcatcatttttgatgacgactgtggccggaagaagttctcccgggccgaatgcgtctgaaatcgtattaaacgcgcggacggattcatatttatccccgatttcgtcaagactgttgtaagacagcgaccctttgtaaagaaggataggcgggacggtgaataccgcaacgattgcaagactgatgagcggccttttaaatgaaaaccgccctgacgtttcccatgctttgctttgaggatgggaaatatcgcccttaacaggccaaaacaggctttttcctaaaacagccataaaaaacggcacgatcgtcatgagcgcaagcagcagcaccgcgacaccgaccgcaacggccgctgccgactgatacagcttaaatgtcgcaaatccgatgcaggcaaatccgatcagcaccgcaccgccgctgtacaaaaccgtctttccggccgttttgtaggtgacgacgatcgcttctcttatatcagcgccatgcgacagttcttctttaaatctgctgagaagcagaatgcagtagtctgtgccgatcccgaacataatcgcaaccataaaaatctgcgtaaaagttgagagcggaaaattcagctgatcgactaaaaatgcgacaatcgactggctgactaaataagatatcaatactgataaaagcggcacaaacggagcgaccactgaccgaaatacaaggatcagcacgatcaggataaaagcgaccgttatatattcagtctttttcaagccgtcctgtgagctttttaacacatcttcgtcgatcagcgattggcctgtaatgccgtatgatacgccgtacggtttcagctctttatcaattttattttttatttcgatgatatcgtttttggatgtatcaagctgcagctgaacgagcatcgtttttctgtcttttgagagcagctgttttttaatgtcgtcatttttctccccgaagtatgaagtcaccgttttaatctgaagcgcttttttatgttcagacaaagtgctgatggcttcttccagacgattttttttgtctgtcattaagcctttttcatgaaatacgatgacggcagaagaagacggtgcatcggaatcagacatttcatcaagcaattcatgggcgtaagaagaggaatatccgtccggtacggaaatctgccctttctcccgtgtcaattcagccatatcaggcgctgtaagcataaatatcaccgttgcggcgacccacaccgcggcgatgatccagcgggctcggataatgtttttcattatgtctgctgatcctcctcagtcatcatcaatcgatataatttttcatatgtattcacgaacatctccgcctcgtcttcatcaaaatacataatatatgatcggacgagttcctcaatccgccgctccacacggtgaaatacttccgtccccttttccgtgacatttaaaagtatgctccggcggtcgctttggctgcgttctctattgatgtagcctttttcatacaggcggttcgtcatagatgtaatggcgcttttattgacgtggcacaccgcggccagttcaattgatttgcaatcgggattgagcataatatagcggaggatgtaatattgatccaatgtcagttctttgttcactttttcagcgataatgctgtcaattttttttaagacgtgcaggtatacatcggaataacgctgaatcagctgctttactttttcttcatgcaccttttccccctccttccgatagttaatatgtttaactattaaaaaggataacgacttgacggtatcatgtcaatcttcaaaataaaataaagaaagacagtgcagattacaccgtctttaatgattcctttttttcttttgcttgtgatgagatatttaacagcgctaaaaatacagacacaatgccgcaaaaagcggataaaataaaaatcagccagcctgcatttgacatcagggcagcaaagatcggcggtcccgccgctactccgataaaccgcatgctgttataaaatgaggtaatggttcccgattcctcgttgtctacgccttctgtgatgacagcgtctaaagccggcaatgccattccgataccgataccgctgacacacaaaaagataaataataaataaaaactgtgattccaccataggccgataaacgacagtgtcacggcactcattccgaaaacgatgcaaaacttcattttgccttggtcttttccgattttcctgcctgctatatatgaactgacggatagaaataaaagcgggattgccaaaagcgctcctttagccacaccgtcaatgccgtatttcttctccagtgagtctgataaataaaaaagaaccccgaacagcaaaaacataatcacgcagccgatgataaaaaccgtaaagagccagcgtccgtcacgcttaaatatgcggccgacatttttcacaaattcggaaatagaaggcgcttctttttgttcctccggctttgccaccaaaaacaatacgagaaaaaaactgatgagcgaaaaaaacggaatgaaccaaaatggcataaaccaaaaccatgcagccaagagcgaaccgagaatcgggcttattactttcccggcagtgttagacgtctcaatatcgccgagccccgcggtaatccgctcatcatcccctttgaataaatcaccgataaacggcatcactacaggagccgcccctgccgaaccgattccctgcagcacccgccccgccaagataatgggataaggatgcttgaacgcggtggaagctatcgcggcaagcgctccgcccgcaccggctatgagaagacaaggcagaagaaccttttttcttccgaatttatcggacagatatccggcaatcggaatacaaataatcgccacaatcgaatagaccgttataattaacgatacttgaaaagacgatatggacagcttcttttcaatcatcggaagcacaggaatcagcatggaattcccgagtgtcatcacgagcggtacagaagccagagcaatgatatttttcgttccatttttcttcttactcaacttattcacccattcactatacttggttgtttcctgttttattgtgccttgcagaaaacaaagtatgtactgaaacggcaaataaaaaaacagacacatgacgcgtctgtcttaaaaacgttttcttacaacatgaaaactgaacttatcagcccggaaataatttaatgaatacagcacaggttcatcattctgattatagtgggtttgcttcagcaataaaagcgccgtctccggctcgcattccaaaaccggtgaaatcgtatcgtgatatccgatcggttcgatatcagcaacggcatagctgataacagatccggagtttttttccaaaagatcaaaaatagactcctgttcatgacagaaagaattcggcagaatgtgcatcggaatcgtatctaaacagtaaacgaccggagtgccgcttgccgttctcacgcgttccaaataaaaaagctcctgctcaggctcaagccggaatctagcgatatcttcatcagacggcgtgatgacctgagacgacaaaaaaatcgtacccggcaccatgttcgcctgctgaatcgttttcgtcacgctgttgagctgttcaatacctgaaagaaacagcggttttgtatggacgaaagtgcccacaccgtgccttctgataatcacatgctcctcttcaaggatacgcaaagcttcacgcagagttgcccggctgacacccattgattttgaaagctcaaattcagaaggaagcttttccttttcggtgtaaattccgttttgtatatcctctttgattcgctcaatcacttttagatacaagtgacgattgtcagcttttgtagacatgtttcccctccgtaaaccactttcataaattattgaacaattgggacaactatatcatgttttaataaaaaaataaataggaatgattttgggtgatatcattttcagtgaaaactctctcctttttaagaagagagctcatcatattgttccttagataatagtacttccctcggtttgcttccttcatacggcccgacgacgccccgttcctccattgcgtcaatcagacgggcagctctcgtatatccgattctgaaccgcctttggagcatggagactgatgccgtctgcatgccgataatcaaatcgaccgcttcgtcatagagatcatccgttacttcactgtgtgtttccgaaacttcttccggaatcatctcttcttggtactgcgctttttgctgcgtaatgacatgatcaacgacatgctcaacctcttcatcggataagaatgccccttgcacacgcaccggcttatttgcgcctacaggcagaaacagcatgtctccgcgccccagaagcttttcagcgccgcccatgtctaaaatcgtccgtgaatcggtctgagaggagacactgaaggcgattcttgacgggatgttggctttaataacaccggtaataacgtcgactgaaggccgctgtgtcgcgataatcaaatgaattcccgccgcccgcgccatctgtgaaagtctcgtaattgaatcttccacgtcggaagaagcgaccatcatcagatcggcaagctcgtcaacgatgacgacgatgtacggcagctcaggctgcttgacttcttcttcggcatttgaccgcttaatatgatcgttatagccttctatatttctcgtacccgtatgggagaacagctcatagcggcgctccatctcattgacgacctttttcaaagcctgcgaggcctttttcggatctgtcacgaccggcgcaagcagatgaggaatgccgttatacacattcagctcaaccattttcgggtcaatcatcatcatcttcacttcatgcggtttggccctcatcagaatgctcgtaataataccgttgacacagacgctttttccgcttcccgttgcccccgctacgagcaggtggggcattttgttcagttcggcaagcacggcttccccggaaatatttcgtcccaagccgatcagaagcttcgcgtccggcttgtcattgagcttggattcaagcacttcttttaacgaaaccatcgcaacttcagcattgggcacctcgatgccgattgccgatttacccggaatcggcgcttcgatccggatatccttcgcggcaagcgcgagcgcgaggtcatcgctcagattcacgattttactgactttgaccccgacgtccggatacacctcatattttgtgaccgccggaccgagatgaacctgcgtcactttcgcctttaccccgaagctttgaaaagtccgttcgagttttcttgcattctcgtaaatgtttttcttatcggtctgctggccggtatgtttcgggtcagccagtatgtccagtgaaggcatttgataatctttattttcaagctctgtaaacgtcatcggcggagccgcagccgtttcgccactgtcttgagcgccgccggaaggctcatcttttgccgcttgtgcagcctcctgcgttttttccggaatcagcggttcggcgggctcttcctgacggtctgaaaagcttgaaataatcggctctgaatggatgatcggcgaaatgatttcctcatcctcttcctccggttcaggctcttcttttttcttttgaacccgtttttgttttttgcccgattttgtttttgttttcggcgaagacatgttcgttctgaccgttttcatatcctcaagaaatgcctgccattgactgcggataaaccggccgacggggctcgtccactttttgagcgtttcctgcagtgaacggcccgttacaagaatcagccccattaagatcagcacgatcgccatgatttgtgaacccgttgatgcaaataaaaagtgggaagctgcaaacagtaccgcgccgatcatgccgccgcccaaatcaggggaagcagcctgctgtttcatgtcaatcataaacagctcccacgtgttgccgatgacacttgccgaccgaatcgacccgtgatgagacagatttttaaagagctgcacgtgagacagcagcaatatactggcgataatacagtacagccctgcctttcttctcgttaaaaggcttggactcttctttttccaaaacagcgaaattccgagaaggaagagcgcaattaagcataaaataaaccactctccggcaaaaaaacggaacaagtacacaaatgtctgtcccacaacgccgagctgcaaaacagcaataattgagattgcaacacagagcagtccgcttagttcgtattttagattgagcttactctcttgtttctttttagatttccgttttttctttgccacactcatcaccttactgcgttaaaaaatgtaaaatcatacatcatgaagaaaagcagccttttgccggctgcatttttctgtaggattcccctattatagcatattttgccccccgagaaacggactgaatgccggttagattttcagcttgattttttgtcccggagcgatgtccggattcagaaaatccatcgggttcgtacttaaaatctgtacgacttcagcttcatttcccttcatctcaactagcagcggcacgccggcgtaatctacctgttcatgcacgctttgctctatatcctgaccgtaaacgacttcttggggcatgacggtataaaggatcattgaatcatccttccttcctcgccctttcgttcctcaatcagctgattcagcttttttatcgcctgtccgacgccgcccacggcatcaattaatccgtaatcagccgcatctttcccgactacgttcgtcccgatgtccctggttaagtttccttttgaaaacatcagctctttgaatttttcttcggaaatatttgaatgatgggtcacaaagttgacgacccgctcctgcattttgtccaagtattcaaatgtttgcggaaccccgataaccagacctgtaagccgaacggggtgaatggtcatagtcgctgtttccgcgataaaactatgatcacatgacacggcgatcggcacacctatcgagtgtcccccgccgagtacgattgagacggtcggttttgataaggatgcgagcatttccgcaatcgcaagccccgcttccacatcgcctccgacggtgtttaagatgatcagaagtccttcgattttcggattttgctcaatggcgacgatttgcggaatgacgtgttcatatttggttgttttattttgcggcgggagctggacgtgcccctcaatttggccgatgatcgtcaggcagtgaatattgctatcttgggacatttgcggcagagatgtctctcccagctgctgaattttgctcataatgctgtctttcgcatctgatttttcgggctgctgttcttcggtgttttccatacgatgatccattttatctttcaccctttccgaatgtctctttgtattatgaacaaagatgatgatttccatccgggacatgaacaaaaacaaagccggagcatcatgcgctccggctttgtatacattatacttccataatgatcggaatgatcatcggcttgcgttttgttttttcataaaggaattgattcagcgcatcacgcattgcttgtttcagcgtggaccattctacggcagatgtttccgtcgcttcagtcacgatagagcggacgagctcagtagcttgtacaattagaccctctgattctctgacatacacgaaaccgcgcgtaatgatctcaggacctgatacgaggttctttttctgcttatcgagtgaaatcacgacgatgagaatgccgtcttgtgacaataagcggcggtctctcagcacgatgttgccgatgtcgccgactccgaggccgtcaatcagaacgtttccgtacgtgactttatccccgattttcacattctggccgcggaattcaacgacgtcacctttttcaatcaagaaaatgtcgctgcgtttcatgccgatctcttctgcgattttggaatgcgctttttgcattctgaattcaccgttaaccggaattaaatatttcggtttcagcaaattaagcatgagtttcaattcttcctgcgaaccgtgaccggacacatgcacgcgcttttgggcgaaaatgacttgagcgccggcgcgggcaagcaggttgacggttttggaatatatcaattcatgccccggaatcggtgttgatgcaatgacaacggtgtctccttcttcaatgttaagctgcttgtgcgcctgcttggccatccgcgtaagagcggccagcggctcaccatggcttccggctgtaacaattgccacttcccgcttcggatattttttcacatcctgcacaggaataaacatttcatcttcggcttcaatatagccgagcttgcgcccaagctgaagcacgttttgcagattttttccggcgattgcaagtttgcggccgttctggacggcagcctgtatcacttgctggatccggttgatattagacgcgaatacagcaatgatgacacggttttctgaattgttcatcgcatcggaaatttcaccgcttacatatgcttcggacggagtataccccgggcgctccgcattggcgctgtcagaaagcagggcgagcacgccgctgtttccgattttggcaatttcgccaatatcacatgattggtgataagcaggcgtctggtcaaatttaaagtctcccgtgcatacaatagagccaagtgatgttttgaagctgactcccactgaatccggaatactgtgaatcgttttaaagaacgatactttcgttgattcaaatgtaatgactgatttagagtgaacttcacgcaaatcagcttttcgattatgcccgtactgcttgagtttttctctcagtaatgcaagcgtaagcttcgttccgtataccggcaccgacagcttattcaataaataaaagacgcccccgatgttttcatcgtgcccgtgtgtcagaaagatggccttcacgcggtcagcccgttctactaagtaggaaatatccggaatgacgacatcaataccgagcatttcattttcagggtgcatcagccctgcatccactacaaatatgtctgagtcaatttcaatgacatataggttcttcccaatttctccaacgccgccaagggcgataattctgacgttttctgtatttttctttttcaaaatctgtatcctcctagtctcatacccgtccatcatcacttgttcctattataactgatatcaattttagaaaacaagaagaagcggaaggtttagggaaaaccaatatgtatacaaaacggtcaaactcacgataaaaatgagaatgaccgcgtattttaactgtataaattttttcttacagttcgctgatgacgctgctcaggctcagacgttcatcttcattcagcgggataagaggaagacgcacagatccgacatcaaggcctttcagctgtagcgccgttttgaccggagccggattaggcgctttaaagagctccttcatgatcggcagaagcttctgatgaatcagtgccgcggttgccgtctgcccgttcgtatagtttttaatcatctgctgcatgtcagaacctacgatatggctggccactgacacgactcctcttccgccgactgcgagaataggaagcgttaacccgtcatcacctgaatagacgtaaaaatcttccggtgtttcggcaatgattttcgtaatggcatcaagatcgccgctcgcttctttaatcgcagagatattcggaatctccgcaagtctgatggccgtttccggcgcaagcgaagcgaccgttctgcccggcacgttgtaaagcatcacaggaagagacgtttcttcagctatggctttaaaatgacggtacatcccctcttgggaaggcttattataatacggcgtgacaagcataacgcaatcgacgccggcttcttcagctttttttgtcagtttaatggagtctttcgtattgttgcttcccgtacccgcaataacaggcacgcgtccgttcacttctttgactgtaaattcaaagagtgcaattttttcttccgttgaaagtgtcggggattcgccggtcgtgcctgcgacgactaaagaatccgtgccgtttttcaacaaatagtcgattaatgtagacagtttttgaaagtctacattccctttactgtcaaagggggtaatcatcgctgtagatatatttccgacattcatttttttcacctcatcatgattcaatcacatttactttgaaagttcaaacacttcatgcagcgcatttacggccgttaccatatctttttcatgaacgagcacccagatcgtcgtatggctgtcggcagattgcagaatcggaatgcctttatcagaaagtgcggagacgattttagacgtgacacccggaacacccattattccggcgccgaccgctgacactttcgcacagctttccgtcactgtcggctcatatcctaattcagccaaaatgctgcgcgcggcttccgttttactgccggctacggtatatacgatttcactcggcgtaatgttaaagaaatctacgctgattccggcatttgccattgctttaaagacttcagtctgaacgttgtattgccccattttggcgggaaccttaaattgcgtcacatctttcacatgggcgatccccgtgatcagccgttcgaatacatcgctgccgatgttagacgaatgatgggacgtcaccaaagtgcctttgtcttttgaataagtggagcgcacgcggatcggcacctttgcctgcatggcgatttccaccgcgcgcggatgaatgactttcgcgccttgataggcaaggttgcagatttccgtatatgtgacgttcggaagcggcttagcattttccacgattctcggatcggctgtcataacgccttccacgtccgtaaaaatgtcgataaactcagcatctaccgccgcgccgagcgccgctgctgaagtatcgcttcctcctctgccgatcgtcgtcgtgtcgcctttttcagtcgctccctgaaatcccgcgacaacgacagcgtcatggctggcgagtgcagcgaaaagccgctctgttttcatttctataattttggcgtcagtatgctgggcattggttaaaaagccggcctgggctcctgttaaagctgcggcttttatgccgttttccttcagcatgctggaaaaaacaacggacgaaatcgtttctccgcaagacagaagcatatcctgctctctcggagaaatgtcggactggctgccgtaaaggagcccgattaaagaatctgtcgcgtacgggtctccttttcttcccatcgccgatacgacaacaacaactttataaccttcactgatggcatctttaatgtgtgctagcgcaagcttgcggcctttgtcatcttttacggatgttccgccgaatttttgaacaatgatcttcactattttcactccaaattagtctgacgtaacagaagagagcaggcagagccttactctcttctgttcgcctatagaaaatacgtttgttttatacgaggttcagtttttgcaggctttccgcgatttgaactgagttccaagcggcgccttttaacaggttatcagaaacaacccacaaatgaaaaccgtttgctctgtccaaatctttacggattcttcctacaaatacatcgcgtttgccgacgcaatcagcaggcatcgggtaaagctgctccgccggatcatcctgaagcgtaacacccggagcttcttttaaaagctgtttaatatcttcaacggttgcgtcatcacggtcaagctcaatgtaaacagattctgagtgccctgtttcaatcggcagtctgacacatgtcgcagccacttccagcttcggcatatgcatgatttttttcgtttcattaatcattttcatttcctcaaacgtatagccgttatcttggaatttatcaatttgcggaatggcgttaaatgcgatttgataatgctttttgtcgcctttaaccggcataatggacggttctgcaggttcattgtttaaaatcgcctttgtctggctgtacaattccttcgccgcttcattgccggccccggacacagcttggtaagtagatacaatgacttttttcaaaccgtacgctttgcggatcggttcaagcgcagccaccatctgaatcgttgaacagttagggttggcgataatgccgttatgtttgtgcagatcaccttcgttcacctcaggcaccacgagcggtgtattttcgtccatccggaatgcgctggtattgtcaatcacgatggctccccgttttacagcctcaggcgccaagctttgtgatacgcttccgccggcgctgaataacgcgatatgaacgccttcgaagctttcaggaacagcttcctgcactgtatattcttcgcctttaaacgttactttcgtaccagcagaacgctttgaggatagtagtgtgagtgtttcgatttcaaagtttctgtcttccagtgttttcagcatttgctgtcctacggctcccgtcgctccgacaactgctacgtgtaatcctcttcccatctgtaaaactccttccgccaattaagcatcatttgttgaattgactttgcattttacgttttattttaccatagaatagtcacggattgaccgaatttttttattccggaatgattttctgtcatcatgattttttattcatgatggtgtacgagcaccggctgaacttgctggtgcaaaagagctttttctaccgtaatcggaaggagatccattctggcgacgagcgatgtcggttttttcacgtggtcgtcctggccgaacgggatgaaatatatgttttttgcggacatcagcctcattaaattcgttccgtttaaaccgagtccgtcgtttgtcgaaattccgagcacgaccgggcggccgttgcggatcgtggctttcgcagccataaggacggggctgtcagtcatcgcatttgcgagtttgctcattgaatttccggttaaaggggcgatgaccatgcagtcgagcggaagtttcggcccgagaggctccgcttttacgatggaatcaatcgcctcaaagcctgttgcttcttcaatttttctgacccaatctcccccctccccaaagcgggtatcggtcgattgaacggttgatgtcacgaccggccggacttcagctccttgactgataagcgcctctatttgcggaaaaacttcctcatatgtgcaatgcgagccggttaatccgaatccgattcttttccctttcagagacatggttatttcccctctttctttaagtctgccaaaagcttgctcaatacgttcgcaataatctgtccggctgttttcggggccacaattcccggaagacccggagcaagcagcgctttaatgccttgtttttcagcatatttgaaatccgttccgcccggacgggatgctaaatccaaaatcaaggtcttcggcgtcatgcgcgataaaacgctttgattcagaatcaagctcggtacggtgttaatgcagatatcaatatcatttacatgttcagtaagctcttcaagttgaaaaggagaaagccccatttccgttatacgggccaaatgagccgaactccgcgcgcccacttttaccttcgcccctaacgccgcaaacgtccgggcgatcgtcataccggtgcgccccatgccgagaacggcgacatttgatccgtgaatggtataatccgtatgctgaatcgccatcatgattgttccttcaacagtgggaatcgagttgaatatcgcgatatcgtcccgttcaaataatttcacaagtttgcggccggcttcgctggcgatcccctcaagatacgcgttggagatgcctgaataaatgacgcaatgctccggtgtccgctcaagatagctctgctttaataccacttcttcatttgaaaaaaccgtggaaacaacgccttctccggtcgttgccgatacgggcaggatgatactgtctattttttgaaagggaatctcatcgattttgcatttgacggttcctgtaaaaccgtcatccaattggtcaaaccctgcaagataaatatcggcatgctgttctgtcagctttcttataatctcaagctgtcttgcgtcaccgccaatgatcgcaattgtcaatccggttaacatctgaaacgttcaccttctttacagttactggatcttttaagtgtcatcctcctcttcatcgtatgtgcaaagagaaagggcggtgaatgtacagcgtctttttcatgaaaaaagcaccggctgtatgagccggtgcttgcaaaaaatgaataagatctactcttcgggaggcgtgatctcccccggaacgtctaaaatgatcatgtctgatccgattttttggatatgattccaggggacgcggatgtcgtggccttgttttcgcaatccgaaccattttaccgtcggtatcaacagcgcggtaatttgtccgtcctgttcattaatttccaaatcggtctggccgagcacgccgagccgctctgcccgtttaatgtccacaatttctttacctgaaagttcactgagcctcatgatagccacccccttgtactatatgacccggagcaaaaaaaaatgcctgccccgtatagaggcagactgcttttccgattaagacgaggccggcatattgccggtcgggctgatgagcgatagtgcgtaatcatccgtaaataagcggcggctgaggccgttgacgctttccaggctgaccgcatttaattcagtgataatttcatccatggtcttatgctttccgagcaggagttcgtttttcccgttccggctcattttgctgtttgtgctctctaagctgagcattaagctccccttcatttgctctttgctgttttccagctctttcggggtgataccgtcacgttttagaaccgataacgtttcctgaatggtttcagacagaagtccgagctgattcgcgccggtgcctccgtaaatcgtcagcataccgctgtcttcataggaactgtgatagctgtatacagaataggccagtcctttatcttcgcgcacatcctggaaaagacggctgctcatgcttccgcccagcacgttgtttaagacgatcaaatcgtaaatgtccggatctccgactttcaggcctttgaaaccgagacagagatgcgcctgttcggtgtctttttttctggtcagcttttcataatgaaactcaggctcgctgatgccgcttgctttgcccttcgcttcgtatgtaccgaaccatttctccacgtctttaatgaattgttccgttacatttccggcgacagaaatgacgacgcggtccggcgtgtaaaagtcatccatatgctgtctgagagaatcgccgttaaatgacgaaagcgtttcctccgtcccgagaatcgggtagccgagcgaatgattgccgtatgtcgctttgctcagcagatcgtggacaatgtcatccggcgcgtcttcatacattttgatttcttcatatacgacgttcttttcttttttgagctcatcttcgtcaaaagcagaatgaaagaacatatcagccagcacatcaagtgcgtagtttgcatgctcatccagcactttggcgtaatagcacgtatattcttttgaagtgaaggcattcacttggccgcctatccgatcgaaggattctgcgatttcccgtgcggacctggtatttgttcctttaaaaaacatatgctcaagaaagtgcgaaataccgtttgtatccggcgtttcatgacgtgaccccgtcccgatccagacaccgattgccacagaccgcaccgttggattattttcaagcacaactcttacaccgttttggcatgtatagcgttttatcaagtctgttcctcctattcaaaagacaggcaaactgccgcctgctacttcatcagcctgttttcatccattaagtcagacactgagccgagcgcgtagcctttttctttgatttttgcaatcagtgtatccaggcttttcgcagtcggatcagtcggatgcattaaaatcatggctccattatgtattttgctcaacacccttgtttgtaaaacagccggagacggtttttgccagtcaatggtgtccacggtccacatgatggtgcccattcctttttccgccgcaagatcgaccacggcttttctgaagctgccgcttggcggcgcaaaccatttcggctttatgcctagcgtctcgctgatttgtgcattggttttgtcaagctgttcggaaatgcttcctgaagtcagtttgctcatatcagggtgattgtatgaatgatttccgatttcatgtccgtctgccgctatttttttccccagttcctgattgtttttcagccatttcccttcaagaaagaaagttgctttgacctggtgctgcttcagaataggcagcatttgctccacgtattcatttccccaggcgacatttatcaggaaagcgaccatcggtttgtcgggatttcctttataaatgggttcgggcgcgagagaatcaagatggactttcggttttacctgctcatagacaaggccgtcttcgtgaaattctccgtcctttttcatttgttcataggatttttccacattgacttttaaaccgttatatcccggtatactcttccatattttatcaatccgcgcgtcttgcggcttcacttcatactctgacgctttttgcagtaattcttcatagagcggatcttttgatgctgacacagttacagcgtcttttttcattgcgtctatgtaatcaactgtatacgggttttttaacatttcaaacgaaacaaaaaaaagaaataaaaaaacggcaaacggcacgaattttttcaacatgtccttcccccctcctcacacattatgtatgaggaggacaaggtagaacccgtctgttgtctttctcaaaataaagaagccgggtctcccaggctccttgttaggttttcatttaagattgttgttgttcctgttctttttctttctcttcgcgcagcactgctttacgcgacagattcactcgtccctgtttgtcaatttcagttaccttcacaaggatttcgtcaccgattttcacaacatcctcaaccttgccgacccgttcgagcgctagttcagagatgtgaacgagaccgtcttttccgctgaagatttcaacgaaagcgccgaatttctcaatccgtttgactttaccgaggtaaagctggccgacttcgacttctctgacaagatcttcgatgatttttttcgctttttggttgctgctttcatcagtagaagaaataaagatggtgccgtcttgttcaatgtcaattttaacaccggtatcttcaatgattttgttgatttgtttaccgctcggtccgataacgtcacggattttatccggattaatgttcatcgttaaaattttcggcgcatattgagaaagttcttttcttgattcaccaagcgtgctgagcatgctgttcaagatttccattcttccttttttcgcctgctgaagcgcttcttcaagaatttctcttgaaaggccttcaattttaatgtccatttgcagcgctgtcacgcctttttccgtgccggctactttaaaatccatgtcaccgagggcgtcttccatcccttgaatatccgttaataccgtatagtactcgcctgatttcacaagtcccatcgcgatacccgcaacaggggctttaatcggaacacctgcgtccatcatggcaagcgtgctcgcgcaaatgctggcctgtgaagtggaaccgtttgattcaagcacttcggatacgagacggaccgtatacgggaagtctttttcattcggaatgaccggctcaagcgcacgctctccaagagcaccgtgaccgatctcacggcgtcccggtccgcgcatcgggcctgtctcccctacgctgaactgcgggaagttataatgatgcataaagcgttttgattcttccacgcctaaaccgtcaagaatctgaacgtccccaagggcgcctaatgtacaaacgctgagcgcctgcgtctgtcctcgcgtaaacagcccggagccatgcgttctcggcagaaggccgacttctgaagaaagcgggcggatttgatcaacgccgcggccgtccggacggactttttcttctgtgatcaaacggcgcacttcgtttttcacgagtttagacagtgtctgtttcacttttttaatcgtatcttcatcatgctcttcttcttcgaatttcgcgacaactgcatttttcacttcattgatcgcgtcttcgcgagcatgtttttcgtgaacctgaatggcgctgagaagatccggctccgcaaggctttttactttttcgctgagctcttcgtcaatttcatacagttcgatttccgttttctctttgccgactgccgcgacgatttcttcttggaatgcgatcaggcgcttaatttcttcgtgaccgaacataatcgcctcaagcatgatttcttcaggaacttcatccgctccggcttccaccatgttgatggcgtcttttgtgcctgcaacgatgaggttgatatcacttttttcaagctggtcaaccgtcggattgatgacgaatttcccgtcaatgcggcctaccgtcacacccgcgatcgggccttcaaacgggatatcggaaacgcaaagagcgagtgatgaaccgaacattgcagccatttcagatgagcagtcctgatcaacactcatgacaatgctgatgacctgtacttcgttgcggaatccgtctgcgaaaagcgggcggatcggacggtcaatcagacggctggctaaaacggccttttcacttggacggccttctcttttaataaaaccgcccggaattttacctactgcatataatctttcttcatagttaacggtaagcgggaaaaaatctagcggtttcggttcttttgatgcggttgctgtgctgagcactgcagtatcgccgtagcggaccatgacagcgccgtttgcctgtttggcaagctggccggcttctactgtaagctgtctgccggcccaatctatggtaaagacatgtttctcttgtcccattcgattacgagctcctctcttaatgtgtgaaataatcaattactcctattatgaacgaaatgaattgaacatatcaatgtcaaagtagtatgtaaaaggatttcattgttttttatcattatttttttcgctttaatacgataaaaaagcgggaatcctcccgctttttacgattatcgacgtaagcctagtttgttaattaactcacggtaacgagttacgtctttattacgcagatacgtaagaagattacgacgtttacctaccattttaagaagaccgcgacgtgagtggtgatctttcttgtgagtacgcaaatgctcgttcaagttgttaattgagtctgttaggatagcgatctgaacttctggagatccagtatcagattcgtgtgttttgaactcactgatgagttgatttttacgctcttgagtaattgccatcctgtttcacctccatatcataattagccccagttacctagcaaccgtcggtgacttcggattgccaagcaatggttttaagactacgaaacatatgatactaaaaatcgcgcccatatgcaaatcttttagaagaaaatttgtgtacttttgatgttttttccgttatttgctgaaaaaacggatcgcttcttgtttgtctttcccgatctgagccgtcagttcatcgatgccgttaaacttccgttcgcttcggattcgtttgtaccactcgattttaacgtcttctccgtatacatcctgttgaaaattaaacaaatgtacttcaattgacggctgatcgggacgcttttcataaaaggtcggtttgtagccgatgttgcagacgccttcatacacctcgccttttatttcggctttcactgcatacacgcctgtcggcggcacgatataactgttgtgcaggccgacattcgcggtcggaaaaccgatggtgcgacctcttttgtctccgtgaatcacagtgccccggacaaaatacggctggccgagaagagtgtgcgcaagttcaacgtcaccatcctgcagcgctgaccggatataagtggagctgatctttctgtcctgctcggtctgtttctcgacagtcgtgcatccggccttgccgtttaaatcgtccggcagcgtctccatcgtgccttttccgtattttccgtacgtaaaatcgaagcctcccacagcgtgccgcgcgtttaaccctaaaatatactcctcggcaaactgttttggagacagagacgcaaacgcttcatcaaactttacgacatacagcacatcagcgcctaaacgcccgatctggctgattttatcttcaagcggcgtaatcagatcctttggctctttgtccctgcccaacacatgggaagggtggggatgaaacgtcataacggccagcgacaggcctttttcttcggctatttgtctggctgttccgattactttccggtgtcccaaatgaacgccgtcaaagtagccgagcgccatgacagacgccggctgctcttctttttgtaaatgatgcggatgagaaatatgtatcgtcttcacagaacggtcaccttttttcttattgttcgcttttttgcatgagcactttagccggtttcagcagtcctttttttgaaggatgcggcatataaatggccacacattctccgtcttcagtacagagcgctatacgggcgtcagctgtcattgcagaaaattccgccgggatgtcaaacactgacccgttttcagctttcttagctaatgtatcacttatgacccatttcggcaaatgattgagcgctctatcgatcggcacggcatgctctgcaaccgttccgtctgaaacctgctgttcaagttcctcaaacgtgaaacactcatcaaggctgaaatcgccggaagcggtgcggatgagatgcgacatatgcgcgggatagccgagtttttcaccgattgtcaccgccaatgttctcacgtaagtgccctttgagcacgtgactgtaaagcggaatgatgctgtgtcttctttataagtgacaggggaagtgagcgcgatatcttcaatcgtgatattccgcttcggccgctccacttcaataccggctctggcgtattcatagagctttttcccgttgacctttacagcggaatacatcggcggcacttgctcctgcggtcccttcagttcgtctaaaacggctttgatatccgcttctttcagcggctccttgacaggttttacgctgaccgtttctccagtctggtcttcggtcgatgtggagaagccgagagtgatctcagcatcgtacgtttttgacttgtcggtgacgtactcaacaatctttgtggcccgtccgacacagatcggcagtacgcctgacacttccggatcaagcgttcccgtatgtccgactttctttgtttttaacagttttcttattttcattacacagtcgtgagaagtcatgccgaccggtttatgtaaaaggagaactccgttaaccatatgtctttcgctcctttgttatcaattgtatcccgtaaaacgcagaaaagaggacagacgacactcgcccatcctctttccttgttattcagacggtttatctgaatgcagttcgtgaatcaatgtttcaatacggttgccgtactcaattgattcatcaaattcaaattcaagctcaggcgttttgcggagtctgattcggctgccgatttcggaacggataaatcctttcgctttctcaagccctttcagcgcctcctctttctttttctctccgccgagaacggagatatacaccttcgctatttgtaaatcacctgaaacacgtacgtctgttacagtgagaaatccgattctcgggtctttcagctttcggctgataatatccccgagctcttttttcatctgctcgccgacacggtttgctctcatactcaattcaatcacctctaagttaaaaccactctgttctagtgatcgtccgttctatttcgggaaaggagtcaataaacgcgagtacgcgctggatctccttttccgcctgaacgtgagaggaggagacgacagcgattccgaagctggtccgctgccaagtgtcctgatagccgatttctgcggccgacacgttgaacttattctgaaccctcgttataatccgcttcagaacggctcgtttctcctttaatgatcccgcatcataaatgatgcattcacattccgcaaatccgatcactttctttcgatttcctgcatgacatacgcttcaatgatgtcgccttcgcgaatgtcattgtatttcttaattgtaataccacattcatatccttgtgaaacttctttcacatcatctttgaagcgtttcagaacgtctacttccccttcgaagatgaccacgccgtcacggatcaggcggagtccgctgtcacgtgtaatgtggccgtctgttacatatccgccggcaatcgtgccgattttcgacactttgaatgtttggcgcacttcaacctggccgatgactttttcttcgtattcaggatcaagcattcctttcatcgccgcttcaatttcttcgatgactttgtaaatgatacggtgaagacggatatctacattttcagcttcagccgtgctcttagcatttccgtctgggcgcacattaaacccgataacgattgcatttgaagcagatgcgagaatgatgtctgattccgtaatcgcaccgacgcctgtgtgaatgattttcacttttacgccttctacttcaattttttgaagagcggctgttaacgcttcggctgaaccttgaacgtcagcttttacgattaaattgatgtctttgacatcgccttgtttaatttgttcaaacagatcatcgaggctcagcttcgctttgtcgctgcgctgttcttccagttgcttggaagcgcgtgcttcaccgacagaacgggctgttttttcgtctttaaagacgaggaattgatcgccagcctgcggtacgtcgtttaagcccgtgatttctacaggtgtggacggtccggctgttttcacgcggcggccgagatcattgaccatggcccgcacgcggccgaatgtatttccgacaacgatcggatctccgacattcaatgttcccgtttgaacgagaagtgtcgcgacagaccctcttcctttatcgagctcagcttcaataaccgttccttttgcctgacggttcggattggctttcagctcttccacttcactgacaagcagaatcatttcgacaagctcgtcaattcccttgcctgtaagagcggacagaggaacgaaaatcgtttctcctccccatgcttcaggaacgagtccgtattcagtcagctcctgcatgacacggtcagggttcgcgctttctttatccactttattcacggcaacgataatcggaacctcagccgctttcgcatggttgatggcttcgactgtctgcggcataacgccgtcatcagccgctacgactaaaatggtaatatcagttacttccgcaccgcgtgcacgcattgttgtgaacgccgcgtgtcccggagtatctaagaacgtgatttttttgccgttttcttcgatctggtaagccccgatatgctgggtgattccgccggcttcaccttcaacaacttttgtttttctgatgctgtcaaggagggtcgttttcccgtggtcaacgtggcccatgatcgtcacgacaggcggacggatttgaagatcttcttctttgtcagcctcttcatatttttcaagctcagtttcttcaagcacaatcacttcttctgtttctacaccgtattcagatgcgatcagttcgattgtgtctttgtcaagctcctggttaatggtagccattacgcccagaagcatcagttttttaatgagttcagacggctctttgcccagttcctcggctaaagctccgactgttaaagagccggaaaacgtaattttctcaggaagctcttttttcggcttcagcggtttttgctgatactgatttttgttgttatgattgcgtttgtttttgtttttgttgttgttgttattcttcttgtttttgttaaattgattattctgcacgtcattcttctttccgtctcgaattttgtttggttgattcccagcaggctgctgattaatcccttgcggcttgtttttgttcgtttccgcaggcttctgagatgtaacgccggcgccgccttttttaaatttcgcatcaagctgcttaatggtcttttcttcaagcattgccatatggttatttactactatatccatgtttttcagcgcagtcaaaatttccttgcttgaaacattgatggcttttgcatattcgtaaactctcattttagccattcgttcacccccaaaaatattaatcgagcaagctgatcagcttattcgcaaaaccttggtcagtgacggcgacaacgacacgtgattccttgccgatagagcggccgagatcagcgcggctttcgacttttttataaggcactttataataattgcatttatcggatactttttttgcagtattcgcagatgcatcttctgtcagcagaacaagttttgcacgcgcatttctaatttcttttataaccaagtcctcgcccgacacgaccttacgagctcgattggccagacccagcaagggaaaccattccattccagacatgttattttttcaccttttccgccagttccagcaattcttcgaaaatctggtcatcgatttgtgattgaaattgattttgcaatgtgtttttctttttcgcagctaagatgcattctttctcaagggtgatataggcaccccgcccgttcttctttccggtcggatcgactgaaatctctccttctttagaacggacaattcggatcagttcctttttaggcttcatttcccccgttaccacgcatttgcgcagaggaattttttttcgcttattcacctaaagtcacctcttattcatccgattcggctgtttcaggctccataaagagcggctctaaatcgtcatcttcttcatgctctctcggatagatgccaaggtctcttgcatccgtttcacttttgatatcgattttccagcctgtcagtttcgcagctaagcgggcgttttgccctctttttccgattgccagagaaagctggtaatcaggaacgatgacattcgtggctttttcttcttcgctgacgatgacatccagcactttagacgggctgagcgcattggcaacaaattcaaccggatcatcagaccagttgacgatatcaattttttcgcctttcagttcattgacgatcgcctgcacgcgctgacctttaggaccgacgcatgaaccgaccggatcaacgtcagggtcatcagtgcggacggagattttagagcggtcgcccgcttctctggcaacggatttcagttcgaccgttccgtcataaatttccggcacttcgatttcaaaaagacgcttcaacagaccagggtgcgttcttgatacatagatctgaggcccttttgtcgttttttcgacttttgtgataaatactttaatccgatcgtgcggtttatagctctcattcggcatttgttcattgacgggcagcagcgcttcaatcttaccgagagacacgtaaataaacttgctgtctaagcgctgtacaattcccgtcatgatgtcttcttcacgatcgataaattctgagtaaatcacgccgcgctcagcttcacggacacgctgcgtcaccacttgtttcgccgtctgcgcagcaatgcggccgaagtctttcggcgttacttctatttcaacgacatctccgacaaggtagttcggatggatgtgctgggcgtcgtcaagcgagatttcaagtcttgaatcgtatacctcgtctacgacatcctttcttgcgaacacgcggatcgtgcccgtctcacggttcagatcgacccgtacgttttgcgcctggttaaaatttcgcttatacgcggaaattaaggcagcttcaattgcttcgatgataatgtctttactgatgcctttttctttttcaagaatagtgagagcatctaatagttcactgctcatgttagcggtctccccccttaaacactaatacttcattcattaaaatgttacagctaatcttgcgttagctattttttcatacggaatattgacccgtttctttcttgttttgaccgtcatctctattgtaacagtttgtccatcgaattcagccaatttgccttcaaacacttttaaaccgtcaatcggttcgtacgttttcatgtacacatttttgcccagtgatttttcgaagtcggcttttttctttaatggacgctcggctccaggagaagatacttcaagaaagtagttctgggtgatcggatcggcctcatccagcttttcgcttaacgcttcgctgactttggcgcactcctcaatatcaacaccgttctcggaatcaataaacacgcgaaggaaccagttttgaccctctttgacaaattcaatgtctacgagttcaagctgaaggtcatccagtatgggctgagccatttcttgaacggtatcagtcacttttttgctcatgtttttcctccttgtgctgtcgatatcatatcagccgttcctctgcataaaaaccctgcttcaaaagagcaggggcattgagaaaacgatggacatgtcgaggcaaaattgcctgttcaatacaaaagagcgggtttccccactctttgcctcggtaatcgttagcatttccaataaaactataccataaccatatatttaatgcaaatcaaactccgctcggaggctgtgcacaaagcttaaaacagagacagctgattttggtccggaagcgactcaagacagccgtgacggtctaaatactctaaaatggtttttgacacttttccgcgtttttgaagatcctcttttgaaaggaactccccttctttccgcgctttcacaatattgagagcggcgttggttccgagtcccggaattgagttgaacggcgggatgagactgttgccgtcaatgataaattccgaagcgctcgaacggtatagatcgaccttctggaaggaatagccgcgctcacacatttcaagcgcaagctctaacacggtaaggaggtttttctccttcggcgaagcatcaagccctttagagctgatatcatccatcaccgctctgatggcggtcgagcctttaatcattgtatcaatgtcaaagtcatctgcgcggacggtaaaatacgcagcataatataaaagcgcgtgatgtactttaaaataggcaatccgcaccgccatcagcacgtatgcggcggcgtgagctttcgggaacatgtatttgatttttttgcatgaatcaatataccagttcggcacattgttctttttcatttcttcttcccattccggcgtcaggcctttgcctttacggacgaattccatgattttaaaggccagtgaaggctcaaggccctgatagatcaagtaaaccataatgtcatcacggcagccgatcacttcgctcagttcacacgtattgttgtgtatcagttcctgcgcattgccgagccatacgtccgttccgtgagaaagtccggaaatctggacaagctcggagaacgtagtcggcttcgtatcctcaagcatctgccgcacaaatcgcgtcccgaattcaggaatgccgagcgtccccgttttacagccgatctgctcttcagtgacgccgagcgattctgtgccttggaaaatcttcataacttccggatcatctgtcggaatcgtcttcggatcaattccgcttaaatcctgaagcatccggatgacggtcggatcatcgtgccccaatatatcaagcttcagcaggttgtcatgaatggagtggaagtcaaaatgagtcgttttccattcagaccccgtcgcatctgccgggaattgtatcggtgaaaaatcgtaaatatccatgtaatccgggacaacgataatcccccccgggtgctggccggtcgttcttttaacaccggtgcagccttgcaccagacggtcgatctccgcgccgcgcatgtgcaggttgtgatcgcccgcatagcctttcacatatccgtaagccgtcttttccgcgacggtgccgatcgttcccgcgcgatacacgttatcttcaccgaacaatactttcgtgtagttatgggcatgcggctgatactcacctgagaagttcaaatcgatatcgggtactttgtcacctttaaagcctaagaacgtttcaaacgggatatcatgtccgtcctttttcaaaggtgtgccgcaagacgggcagcttttatccggaaggtcaaaaccggaaccgactgatccgtcattaaagaattcggaatatcggcagctcgggcacacgtagtgcggagcgagcgggttcacttcagtgatttccgttaaggtcgccacaagcgatgaaccgacggacccccgggagccgacgagataaccgtcatccagagaccgttttacaagcttatgagagatgagataaataacggcgaacccatgaccgatgatactttttaattctttttctattctcgcttccacaatttcgggaagctcttcaccgtaaatgcttctggcgcgctgatagctcatttcacggatttcttcatcagccccgtcaattttcggcgtgtacagatcgtctttgatcggtttgatctcatcgatcatcgaagcgactttctgcgtattgtcaaccacgatttctttcgctttttccgcaccgaggaaggagaaagcctccagcatttcatctgtcgttctgaagtgcactttaggcagttcgtgtctgtttaacgggttggcgccgccttgggaagatattaagatcttccggtaaattttatcctcatcgtttaaatagtggacatttcccgtagccacgaccggcttattcaatttttccccgagcttcgtaatgttggcgatgatttctttcagcgctttttcatcccggacgagctcaagctgcagaaggtgtctgtatacttccggcggctgcacttcaagataatcatagaaggatgcgatatcttcaacctcttcaggagatttttgcatcatgccttcaaagacctcacccctgtcacaggcagagccgattaacagaccttctctgtatttattaagctgcgacctcggaatgcgcggcactcggtagaaatattgaatatgagaaatggacacgagcttaaacagatttttaaggccggtctcatttacggcaagcaatgtagcgtgataaggccttgatctctgataagcattggattgtcccatattctcattcagctgatcatgataaaaaatgtctttttcagcggcatctttgagcattttcaacagcaggtagcccgttgcttcagcgtcaaaaaccgctcggtgatgctgggttaattcgatatcaaacttcttacataacgtatttaagcggtgatttttaaactcaggatacaggaaacgcgcgagttccagcgtatcaatgaccggatttttcgctttttccgttttcaaaagacgcttgtacgctacatttaaaaatcccatatcaaagctggcgttatgagccacaagcacgtcatcgccgatccattctttaaaatcccggacgacatcaacgacatcgggagcgtcgcggaccatgtcgtcagtaatcccggtaagctctatcgtcgttgctgacagcggatggtgcggattggcgaacgcttcgaatttatcgatgatttctccgcctcttattttgactgcggcaagctcaatgatggtgtcatacactgcggacagacctgtcgtttcaacgtcaaagacaacgtatgtgtcttcttccaggagacggtgagctggattgtatgcgatcggaacgccgtcatctacgatattggcttccattccgtaaatcattttaatgccgtgttttttcgcggcggaataggcatccgggaaagactgcacaacggcatgatcagttaacgcaatcgcttcatgtccccattttttcgcctgttcgacaagctttccgatgcccgttacagcatccatttggctcatcggagaatgcagatgaagctcaacccgtttttcgccttcaggagcggtgtcttcacgggttttggcttttatttcattcacgtcatttgcaatcatgacgaggtctctgacgaatgtatcgttttgaatgcttccccgcgcctttacccacatgccttttttcagcgttttcatcaaagcggcgtcttctttttctctggcgaacatttttactaaaatgctgtttgtatagtccgtgattttgaaaatgcagagcgtgcgtccgcttttcagctcgcgtgtttcagcatcaaacacaaacccctgcaccgtaattcttctttcttcatccatgatgctgtcaagcgtccggatttcttcgttctctttaatttgatagccgatgacaagcggtccggacggtgcctgatcctcatcgccctctttttccttcttctccatctcgataagcgcctgcatcgcccgctcctgatcttcagcaagcttttgctcgcggaatttctggacttcttggtcagatacgaaaatttcggtatccagctgcagttccggaaagccgaattggcggtagctgtgctgaatcagcgcgaagtatttatttttgagcgcagatgcttctgtatctgtttttgttttcacgatcagtttgtttcccttgagcttcggcttctgctgattcaaaagagccaccatcggcggcgaggttccttcaagctcttcaatacagcgtgtccaataatcctgtacaagctcctctgtcactgtagggtcgatgacctgaacagacgatgtgacacgggcgatgtgagcaaacgattgtgttaacctcatcatgaatgaatcatatatttgatacggcaaaagagccttaaagcgaaattggaaatgccaggccttttctgctttatggattgtcagtttatcaatctctccgtcttcaaagtatgtcatgaaggtatcatctgtcatattaagctgctgcagaagaatctgaaactgtcttctgtttactgataactgttccattcagacagtatccctcccttaaaacatcataagtgaaggtacctccgcaggtgatgaggtaccttcttttttctctattttaacatgattttgtatgattcgttatggtgattacttcgtcttgataaattcagaaagctcatccactgaaacttcggcagattcaccggttttgcggattttcacttctacgatgccttcgtcggcacgttttccgacagtgatgcggatcggaaggccgatcagatcagaatcagcaaacttcacgcctgcgcgttcagcacggtcatcgtataatacctcataaccttccgcctggaatttgccgtaaagctgttcagcaagctctttttgcgcttcgtttttcatattcagtgccaaaatatgaagatcatacggagcaacgcttttcggccagatcaagcctttttcgtcgtgatgctgttcagcgatggctgaaagcgttctggacacgccgattccgtaacatcccatcagcatcggctgcgcacgcccgttttcatcaaggtatgtcgcattcatcgcttcagagtaacgcgtgccgagtttaaagacttgtccgacctcaatcccttcagcgaaacggatcgtgccttttccgtcaggtgacggatcgccttcctgaatgattcgaagatcggcatatgcttttactgacgcgtcacgttcgatgtttacgtttcggtaatgacggtctttttcattcgcgccgctaacggcgtttaccattactttcacggcttggtcggcataaatctcaatgtcgccggcagcgccgatcggccccgcaaatcccggctccgtgccaagtttctctgctacttcttcatgagacgcaagctcaaccacttccgtgttcagaaggtttttcactttcacgtcattgacctcatgatcgcctcttactaacacgagaacaaatcggtcatcagctttaaacagcattgatttgatgcaggcgctcggctcgatctgcaagaacgaagcgagctcttcaatgcttttgacattaggcgtatcaattttctccaatgcctcgggggtttcatctgacggctcgctgttcatgacaacttccgccatttccgtattggctgcgtaagaggatccatcggaataagcgatggtatcttcccctatttcagaaagagccataaattcatgcgtgtcttttccgcccatcgcgcccgagtcggcaataacgggacggacgtttaattcacagcgtgcgaaaatgctgctgtatgcgccgtacatgttttggtatgtttcctccagactttcttcagaagcatggaaagaatacgcatctttcatgatgaattcgcgtccgcgcaataagccgaaacgcgggcgtttttcatctctgaatttagactggatctggtaaagagtgagcggcagacgcttataagatttcacctcatcgcgcacgagagaagtaatgacttcttcatgcgtcgcgcctaaagcaaattcacggccgtggcggtctttcagacgcattaattcaggcccgtacgtataccacctgcctgattcctgccatgtttcagcctgctgaagggccggcatcagcatttccaccgcgttgattttttccatttcttcacgcacgatcttctgaatgttttgaatgaccctgtaagccaggggcatgtagctgtaaaccccgctcgtattttgtctgataaatcccgctctcagcagaagcttatggctttttgcttcagcatcagccggcacttctctcagggtcggaataagcgtcaaactttgtctcatgtcttcgcacctctgattttttactagtcaattataagaataaacgctggatatcgttccatgtgacaaccagcataagaagcattaagaaagctacgccgataaatacgacaaatgcttccttgtcacggtttatcggcttgccgcggattgcttcaatgaataaaaacagcagccgcccgccgtcaagcgccggtatcggcagcaggttgacaattcccaggttgatgcttaaaaacgccgcaaactggaataggttgataataccggtttttgcaacttgatccgtcatatcataaatgccgacaggacccgaaagcatatcaagcttaaactggcctgtcacaagtttgctcagattggtcaggatcgcttttgtgacatcaacggtagatgtcgcgccgtaggcaatcgctgcaagcgcgcctttttcagtcggcgcataagagccgaagcggccgattgtttttttattttcatcttttacagcttcaggtgtaaccgagatatgaaacgatttgccgtcccgtttgacggcgacatcgattttttttccgggattttcttttaccgctgtcacgatgtcggtccatgacctcattttttcaccgttaatgctctggatatagtcgccttcttttaaaccggcagccgctgcgcgtccattgtctgtcagcttcccgagctcaggctgattcgaaggcacgccttgaatgaatccaagcatgacgagaatgacatacgctaagatgaagttcattatcggaccggcagcaatcgccttaatccgcttccatacgggtttagacccgaattgtcgattgtaaggcgcaatctgcacttcttctccgtctacgataaaaaaagaggtctgactgacagtaaagcccgccagttcatcttctttcccctgctcgtacccggtaatcttcatttcgtgctcaagatcagccgtctccacctcgataattaaagcgtcgggatatttttccttttgattaatgatgactttttccacttcgtcatctttattaaaaagaagcccgacggtataaccgggtttgacttcgatcatctccgggtcttcaccggccatgcggacgaacccgccgaccggaaggagtctgatcgtatacacggtttcattctttttaaatgaaaagattttagggccgaagccgatcgcaaattcacggcaaaggattcccgctctttgggcgagcaataaatgcccgagctcatggaaaaaaacgagcgttccgaaaataataataaacgcgataactgtattcacgaacataccaccttatgtgagtattgaattaacgtatccccgggtgtctttgtccacttcttggatatccgcaagactcggatcctgaattacgctgtggcggtccaatgctttttcaatcaggtcctcaatcgataagaatgaaatccgtccggcaagaaaagcggcaacggcttcttcgttggccgcatttaaaaccgtcggcatcgttccccctattttacctgattcaaaggcaaattgtaagcagcggaacctttcaaagtcagctttcgcaaaatggaggcttccgatctcccataattcaagcctttttgtttcaggcagaggcagacggtccggatatgtcagcgcatattgaatcggcaccctcatgtccggatttccgagctgggcgatgacgcttctgtcgtgaaattcaaccatcgaatgaatgatgctctccttatgtaatacaacgtcaatctgttcatacggaatgtcaaacagccaatgcgcctcaatgacttcaagtcctttattcatcattgtagccgagtcaatcgtaatttttgcgcccatcgaccagttcgggtggttaagggcgtcggcaatcgttacagactcaagctcctgccgcgttttatctctgaaactgccgccggatgccgtaatgatcaggcgctcgatatttttgctctgttcgccttgcagggcttgaaaaatagcggaatgttcgctgtcgaccggaagaagaggaacaccgtatcgttttgcgtgtcctttcactatatgcccggcagtgacaagagtttccttatttgcaagcgcaattgtttttttctgttcaatcgctttcaaagtcgggattaaaccgacgcttccaagcagcgcattgaccacgatatccacttcgtccatgactgccgcttcaatcaggccttcttctccgatgccgatttgacattcatgagaaaaagacgcttctttcactttttggtatgtatccatgtcgccgactgctacatatttcggctgaaacgttctgatcaacgggatcgctttctcggcgtttttaccgaaagtcatcgagacgagacggaactgatcttgatgcatgcgcaatacgtctaacgtctgctcccctattgatcctgttgctcctaaaagacaaatattcttcaaaatgccactcccattctatgcgtccagatcggtcttattttcatattagcctttctcatgaaaaaagcgcaagcagaaagtataagaacggcatgacaaacaaaaagctgtcaaatcgatctaaaatgccgccgtgcccgggaaggatttttcccgaatccttcacatcatagtgccgcttaagcgctgattcaaccaaatccccgatctgtccgaatacagacagaacaagcgtgatgaccaaaagaaccgggtatgaaatcggaaggtgcgcaaacagctgaaaaacagccgtaaaaataagggcgatgacaataccgccgagaaacccttccaccgttttgttgggactgatttcgggccacagcttccgcttcccgagcgactttccgacgaaatatgcgcctgagtccgttgaccatatgacaacgcaggcataaaagatatataaaagcccgtttgtttcaatgtttctgatttcaataaaataatgaaaacacagtccgatatataccgtcgcgagaacgataaacccgacttcatcaaacgtaaaggtgtttttcacgagcaccgtatagctgagcagaatcaatacggcgaaaatcgttacttccattttcgcatcgaaaaaatgatatttgtccggcatcatatacagccataacaacaagaggctgatcagacccggaaaagaaaaaaatctgagctttttcatccgcaaaagctcaaaaagcgctatacttcccatcacgtaaacaaatacggtgaacggcaatcctccgaaaataaccaaaaataaaaataatgccgctgccagaacacctgttaacaatctttgtttcatttccaccatcctctaaattccgccaaacctccggccccgctgctgaaattctcccactgcctgcagaaagtgatcttctttaaaatcgggccacaggacatctgtaaaaacaaattcactgtaagccacctgccaaagcataaagttgctcaatctgatttctccgctcgttctgatgagcagctccgggtcctggattgattctgtcattaaatgcccggaaaagagcgcttcatcaatgtcttcgatattcagcgtgccgcttttcacctgttcagccagtgcttttgccgcattgacgatttccgtgcgtccgccgtagttcaaagcgaaattgagaatcagcccgtcattttgttctgtatcttttacggccttctcaatcgccctgtacgtatgagaagggagcgcggattcatctccgataattttcacctgtacattttcctctattaattcaggaagatacgtattcaggaactcttccggaagcttcatcaaaaagtcgacttccatcttcgggcgcttccagttctccgttgaaaacgcataaagagtcagaactttaacgccgagctgacttgcgagctttgtcaccctttttaccactttcattccttcatgatgtcctgcaatccgagggagtgaacgcttcttcgcccagcgtccgtttccgtccataataatggcaatgtgtgcgggaatttcacccttcagtatgtcttcttttgtataccgttctaagttggaagccgcattctgctgattcttccaatttttgagtatgttgagcatgagattcctccgtcacccaaaaaggttgcgttgctgatgatcaatgtaatcaacagtattaacaaaaaaaccccctgtaaacatgagagggtcttttcacattatctattgtacatagtttttcattaaacttccatgatttctttttctttgtccttcgtgacgctgtcaatttttgacacatattcatctgtcagcttttgaacgtcttcactggaagcacgaagctcgtcttctgtgatgtctccgtttttctcaagttttttgaggtcatcgttgctgtcacggcggacattacggactgctactttcgcttcttccgcgtattttttcacgactttgacaagttctttacgtctttcttccgtcagagccgggatcgcgatgcggataattgtgccgtcacttgtcggcgttacgccaagatcagctttcaaaatcgctttttcaatatcaccgattgccgttttgtcatacggtgtgacaacaagcatacgcgcttcaggcacattgatggaagacagctggtttaaaggtgtttgggcaccgtagtattctactgtcactttatccaatagagatgggttggcacgtcctgcgcggactgacgccaattcacgtgaataagcggcaaccgctttttccatgcgttcttttgtttgtgttaatacttcgtttgacaacgttatttcccccttacgatcgttccgattgattcgccgattacggcacgcttaatatttccttcttccataatagaaaagacgatcagcggaatatcattatccatacatagtgaagaagccgtagaatccatgacttccagcccgtcttttaacacatcgagataagataatttttcgtatttaacagctgactcatcttttctcggatcagcattatacacaccgtcgacattatttttcgccattaagatcacgtccgcttcgatttcagcggcacgcagcgctgcggttgtgtccgtagagaaataagggtttcctgttcccgcggcaaaaataacaacgcgttttttctccaggtggcggatggcttttcttctgatgtaaggctcagcgacctgacgcatttcaattgatgtctgcactctggactgaattccgagcgtttccaggctgtcctgcagggcaagtgagttcatgacagtagcaagcatgcccatataatcggccgtcgcacggtccattcctaagtcactgcccgtttttccgcgccataagttgccgccgcctacgactacggccacttcgacgtcaagctcagcgatttcttttacctgtttagcgatggattggatgacagtcggattaatgccgtttccctgctctcctgccaatgcttctccgctaagctttaaaacgatacgattgtattttggtttttccataataacctccaagtgtaaacattgccgtttcctattatgcaagagaaaaaaaggtttgtaaatatagttttaaaaatagggaacacaagtagtgtcccctatactgcctgaaaagccgcgaaagattcgccaaggctttccgccattattttttcacttggttcataacttcttcagcaaagttttcttggcgtttttcaataccttctccaacttcgtagcggacgtaagttttaacagatgcgtttttcgcagccacaacttgtttcactttttcgtctgggtttttaacgaaggcttggtctaataagcaaatttcttcgaagaatttgttcagacggccttcaaccattttagctacgatgttttccggtttgccttcttgaagagcttgctgagtcagaatctgacgctcatggtttgcttcttcttcagacacttggtcgcgggaaatgtaacgaggatttaccgctgcaacatgcatcgcgatgtcttttgcaagatcctcgtcagttgttccgctaagaacggataatacgccgatgcggcctcccatgtgaaggtaagcaccgaacgcttcgctgtcttcttttgaaataacagcaaaacggcgaagagtgattttctctccgattttagcaacgttgcttgtgatgtattcttcaacagtagaaccgttttccatcttttgacccattgcttcttcaagatcagcaggagcgtttgcaagaaggtggtcagcaagcgtgttcagaagctctttgaagccttcgtttttcgcaacgaaatcagtttcagagtttacttctaagataacgcctttgttgccgtcagttttaataagagtagaaccttcagcagcgatacggtcagcttttttagccgctttcgcaattcctttttctctcagaaggtcgattgctttgtccatatctccgtcagtttcagtcaatgcttttttacagtccatcataccagcgcctgttttttgacgcagttcttttacctgctgtgcagtaatagccatttgaattcctccttatatgtgtaaacaagatatgtatagatacatttttcttgaaaaaaggtgataaaaggcagtccctcttatcaccttttgattaggttacgcagttgtcgtttctgtttcaggtgcagtctcttcagcagcttccgcttcttcttcgccttgcttcgcttctaagatagcatctgccattttagaagtaagaagtttgacagcgcggattgcgtcatcgtttgcagggattacgacatcaatttcatcaggatcacagtttgtatctacgattccgatgataggaatgttcaatttgcgagcttccgcaacagcgatgcgctctttgcgaggatcgatgatgaataatgcatcaggaagatccttcatgtctttaattccgccgaggaatttttcaagacgctctaattcttttttcaattgaacaacttcttttttcggaagtacttcaaatgtaccgttttcttgcattttctcgatgtctttcagacgcttaatgcgtttttggattgtttcgaagtttgtcagtgtaccgcccaaccagcgttggttgacatagtacatgccagaacgtacagcttcttctttaacagaatcctgagcttgtttttttgtgccgacgaaaaggatttttccgccttcagcagcaaggtttttcgtgaagttgtaagcttcctctacttttttcactgttttttgaaggtcaatgatgtagattccgttacgctccgtgaaaatgtaacgcttcatttttgggttccagcggcgtgtttggtggccgaagtgaacaccagcttcaagcaattgtttcatagaaataactgacatgtgatttcctcctaataaaatggtttttttcctccgcttaggtcatttttgtgcagaactgccgtttgcagcaccctctgcataaatcgttaagcgtgtgtatttaacaccaagacataatataacacagctttatgcgacaatcaagaatcctttacagctttgccgcgaaattttaaaaacagctcgatttctgtctttccgctctgcatccgtttggcgatttccgcgggggtgagcccttgttcatataattctgaaacacgttcttcaaacgaatgcgcgcccctgttttcgtcactttcaacccgttccgttgcactgataagcttttccatgtggtccggaatatcaggctcttctttcggttccggccggggttcggcgtcttctgcgtccggcgcttgacggctttttgcgtcttcgagtctttcattttcttctttcagctcaagcagaaacgctgcaagggtgttttccgtctcttcaagaatcttcttctgctggcgctccgtctccttgagggctgaaaacctcgtgtacagaataatgacggcataaagcagtacgccgtgaagcacaaagcttaaaagccataatagtgttgacatgtttttcactcgctaaccatgagttcattattgaattactttttcaagcagatgctttaatttaaacagcgcctttgaatgaatctgtgaaatccgcgacgtcgaaaggttcaagacttgtccgatctcggtcaaagtcagttcttctttatagaataaactgacgacaagctgctctttttcagagagctcgtgaattttgcccgcaagctgagcgatcagctcgtccttcatgattttttcttccggcggcacatttttgtcatctctgatcatcacttgaatattctcaccgtcatcctggtcgtgaagcttttcatcaattgataagagattggcaaaaaacccttcattcatcgttgatactacgtcctgctccgtcatccccagctcttctgcgatctctgaaggagtcacattccgaaggtagcgctgttcaagtttttcgatcgccgcttcgactttttttgtcttctcccgtgaagttctgggcagccaatcttctttacgcagcccgtcaatgattgcaccgcgaattctaaacgaggcataggtatcaaattttaaatcccggccggggtcaaatttttccagggcatcatataaaccaagcataccaaggctcattagatcgtctttatgcaccgatttcggcagtccgacggaaattctgccgacatgatatgtgaccagcggcatgtaacggcgcattaaatcatcaccggctttaggatctttccactctttccagcgcgaccaaagcacctgatcttcataattcaaggattgcattgttatccccctacctcatacctttattaaatcgttgtttcaccttgtttaacagttcgaatgtgcagcatgcaggactttggctcaaattcaatcgtccggccgcttgagccgcccgtatcttcactgatgaccggaatgttatacaatgaaagctgctctttgatggccgctacattcctcggaccgattttcatcaggtcgtttgtcattttaaacttaaacatctccgctcccccggcgagttttgccttcagggcaaacttgcggcagccggctttcaaaagcatatcaatcgtcatcttaacggcggtgtccgcgtattttgcacggttgagctccgccgtttttgataaaccggagtccggcagcatgacgtgaacgagtcctgccgtttgtttgtctttatcgtataaaaccagccctacgcatgaaccgagtcccgaggtccggattttatccgggtaacgcgcgacttgaacatccgcaatccccactttaacgactgcggcttccgcacggctcataaagccgcacccaatgagacgaagagcttttcaaaagaatcatagtccgggagcataaacatgtgggctttgagctcttgccggctgccctggtcaaaaatagaagtatccacgacaatggcatgctctccgacttggctgagttccatcagcccttcactgataaccgcgccgaacatatcaagtgagatttccggcacgctcgggtaaatctcaagctttgtcaaatcagccaatgccgttaaataggaacctgctaaaatattgccgaactcatgtaaagcagaagaactcaaatgatcttcacccaactggtcaatatcaaaatccggatttccgatcagctctctgataaactgttccgcctgatggaaaggcatgatgagaaagatagagccggtcatgtcgccttccattcttaaaaagatactggcgaccggcgtttcagccccgccgaaaaaatcagcgagctcatcaaatgtcaataaagtcgcaaacggcacttccatgtctatctttctgttcagcagctgagccattgcagaagccgagtgacccgccccgatatttccgacttcccgcaaaatatccatctgctcttctttgatcgcttcaaacttactcatgttgtcttttcccctttaagcattaggctctccggacgcagatgccgaagcacctttatccagcaccgcatgcgcatcgataatattgaggagcctgttatcttgcttgacgatctgtttaatccacacatccgtttcctttgtctggctttcaggcgcggattcgatttcattttcatgcacggtgatgacgtcattggcctcatccacgacccatccgacatcagcgtcacggtaagaaatgatgataatccgagtctcttctgtgatgtcctgttcaggctgattcagacgttttcttaaatcaagaaccggggtaatcactccgcgcagattgataacgccgcggatataagattccacacccgggaccctcgtcggtttttgccacttttcaattgatttcacctgggaaactgagatagcgtattctttcccgtttatcataaacacaatcattttttcacctgttttgatttcagcagtcattcgggcacctcctcgtgtcgttttagtagatcagcgcattgcaatcaataatcagcgccacttctccgtttccgagaatcgtagcgccggaaatcgcaaagacgttcgtcaaatagtcgccgagtgatttcagtacgacttcctgctgtccgataaaagaatccacgacaaaagcagtggatttatcgccctttttcacgacgattacatggaactgatcggcatcctgttttgaatccgtaatgccgaattcttttttcagatagacgatcggaacgatttggcctctgaaatcaatcacttctctgtcatgcgtctgcaggatatctttcttatcaataacagccgtctctataatagaagaaatcggtatcgcaaacgtctcttcttccagtttaatgagaagaacggatataattgaaagtgtcagcggaagctggatactgaaaagagaaccttggccttccgcggatttgacactgacagagccgccgagtgattcgagtttattttttacgacatccaggccgacgccccgccctgaaatgtcagaaatttgatcggcagtcgagaagcccggagcaaaaataagctcgtaaatctcattatcttcaagcgtttcagcatcacgttcggtgattacactccgctcgagcgctttttcaagaattttctttctgttcaggccggccccgtcatcttcaacctcaataaagacgtggttgccgctgtgatatgccttaagcacgacatgacctgattccggttttcctttattcacccgcacttcaggcgattcaatgccgtgatcgatgctgtttctgattaaatgaacaagcggatcgccgatttcatcaatcaccgtgcggtccagctccgtttcagctccgatgatggacaattcgattttcttgtttaattccttttgaagctggcggatcattctcgggaaacggttaaagacggtttctaccggcaccatccgcatattaagaataatagactgaaggtcgcccgagattctggtcaggcgttcaacggtttcagtcagctcattgtggtcaagctctttggcgatctgctcaagacgtccgcggtcaatgacaagttcttcaaaaaggttcattgaagaatccagtctttcaatgttgacgcgaatcgttttcgagccgctgtgatgcttcggctgttcttccgttttcgcttgcggcttaggctgtttctcagcctttttaaccggagcttccttcaccggttcagccgcttgcggtttttcggccgtttttaacggcgcaccggcagaaatttcgacattctccacttctgaaatgccgctgatgagttctttaatttcttcagcaggctgctttgtcaagaaacacacctgaaaatccgttccgaaatcttccgtctcaagcacttccgcggcgggtatcgtttttgcgacttccccggcttcattcagcttttcaaatatcatgtacacgcgcacggctttgagcatgcagctttcattcagggaaaccgttatttcatagcggctgaatccttgctcttccgcctcttcaataacagtccgttcgaactcgtcataatcccattcagttgaagcctgttgttttgaagccggcggttctgctgtttcggctgaagccgcagtctcatgcaccgcatttacgtcgagcttcgcactcacttcagaaatatcacgtttgccgtctcctccgtcaataatggactgcaccatctcttcaagatgatcaagcgcttcaaacagcacatccagccaatctgatgtaacgggcatttctccgttgcggatggcgtccagcacattttccatcaggtgggttaaatgcgccagatctgtataccccatcgttgcgctcatgcctttcagcgtatgggcagctctgaagatgtcatgcacaagctgaaggtctgccggatctttttccaacagcagcagcttttcgttacatgtctgtaagtgctctttactttcatcaataaagacatctaaatattgattcatatccaattgattcacaccctctcttttttcacacatccggtaatggatgccgcgatatcttccacatgtttaatctcatgaatgaggcccgcctttatcgctgacttcggcattccgaacacaacacaggattcgtccgattccgcaatcgttttaacgctgcctgttctaagcatttcttttacgccctcggttccgtcgctgcccatgcctgtcataatgacggctaccttttcgtaatcggataagcggcttgccgaccgaaacaaataatcggctgacggtttatgccggctttccgtatcatgaacgtcaagaatgatgcggagccttccgccttcctctgcaaccgtcatattttttccgccgggcgcgatgtacacccatccgtctttcgcttcttcaccgttttccgcttctttgacctgaatatctgacaaatggttgagtctgtctgcaagtgaagcggtgaagccttcaggcatgtgctgaacgacaaatacaggcgcctttaaatccttcggcagtttcggaatcaccttttgcagagcccgcggtccgcctgtagaggtcgcgatgaatacggcctgcttggcggatcttactttcggtctttcaaatcccgccaaagccggacgttccgggatagaagactctttcactgccgcctcaggtttttgtgcgcgggacagcccggctgcaatcaccctctcaatcagctgctctttaattttataaagatcaagtgaaattgctccggaaggcttggtgataaaatcaaaagcgcccatttccaggcagttgatcgttcggtccttcccttgctgtgtctggctcgataccatgatgacgggaagtttatatatgctgatgatcttccgcaatgtatccgttccgttcatgaccggcatttcaatatcaagcgtgacaacatccggtttgagaagctctattttcttcagcgcctcttccccgtttctggctgtcccgatgacttctatctgcacttccgcagccagaaaatcggtaatcatctttctcataaaagctgagtcatcaacgacaagcacacgaatcactgtaaagtcctcctcaataaaaaagaagataatctctcaataaatgccggtttctcttctcttggtttgttttcttccgtttgaaacaagacatccgtcagaagacggacggacctgctggcttttgcttgaggactttttattaaaaaaggcacctggtcaatgacggcttgacttactaacgggtcatcgggtatggagccggcgaaacgcacctccgcgcctaaaaacatgtgaatcgcatgagaaaggcggttgtacgtgtccagcgcctgtttttgggcgcgggcgcgattgacggcaatgtttacggtcagccgttcatccgcgagcaagagatgtttgatcgcgctgtaggcatccataatggccgtcggctcaggcgttgtcacggcgagaatgtcttccgccgataaaataaacggcagctgttcttttgaaagtcccgctcccatatcaaacagaacgtaatcaaaatcgcttaatacagcggaaagaccattcataaaagccgaccacttctctccgtctgcttgatagatcgcctcaagccccgttcctccggatatgtagcgaaggcctttcggaccggaggacagtgattgcgccaatgcgtgccgattctccatcacatcaataatggtgcgggaagaagcagcgccgatcagcacatcaatgttgcccattccgatgtcaagatcaatgatgagtgctttttttcctttttcctgcagggcaactgccatgtttaatgttaaattagattttccgacgccgcctttaccgctgatgacggctaatgtcttcgcttttttctcataaagctccggcttgatcatttgccgctctctcattttccttcttaatgactctgcctgatcgggtttcatgtcaaaagcatccttacaaactcttttggtgaagccgataggatgtcttcaggcacatcctgtccatttgtcaaataggcggcgccgattcttgattccgacagcacttgaaacacggagccgagtgaggcggtttcatccgttttcgtgaaaatgaattgattgaccggcacacctgaaaactgtttcagcacctgtttcatatcttcatattttgcagatgcggataatacgagaaaggattgtaagcctgattcaaacggaatcatctcttgtaattccgtaatatactgctcttctttaaagtttctaccggctgtatcaatgaaaacatggtcatattcagcgaatttttccagtgccttcagacattcttcctttgaatagcatacttcaagaggagcctgaagcagctccgcatatgtcttcagctgctcgaccgcggcaatccggtaagtatccgtcgtcataaaggcaatttttttatgctctgtcagcattgatgaggccgcgagtttcgcaagtgtagtcgttttgccggccccggttgaaccgaaaagcacgacgtattttgattgaatcccttcctgccacctgtctgccgaagggagctttttcactaacaaatcctgcagttttgagctgacattatcttcagttaaatctccggaaacaattgaagaacggagcaattcactgagtacggcgttttgcgtatgatcaggaagcccggcttgcttcaatagtctctcggctttttttaatggttcagggagcacttctttaaaatgcgccagttcgccggaaatactttgatccggaagacgcggcggctgaacaggctcagctttctccgccgttttggtctttttcatttcttcagcggcagccggcggcgtttttctcgcttccctgacgtcacgatctaaaaccgctatcacttcgacggcctgctgcgaccgcagccccagccattttcttttctttacttgtttggaatgtaaaataacggcatcattgccgagttcctttttgatttgcttcgcggcatcctgcattgaagcggctgtaaatttttttattttcattaaatatccaccactccaatgctctgtacttcaacatttgcttccagctcattataagaaagaaccggaagatcagggaaataccgttctaacagctgttttacatacattctgacagcaggcgagcaaagaagaatcgccgactcctggcggatggaaagctgctcggcctctttagcgacagaacggatgatgctgtctgaaacctcagggtcgagtgacaggtaattgccctgttcagtctgctgtaccccgtctgcaatcgctttttccacccggcctgagcatgtgatgaccttcagcgtttcatgctctctcgcatattgtgccgtgatttgtttggcaagcgactgtctagcgtattctgtcaaaaggtctgaatctgtcgttaatcttccgtaatcggcaagagtttcaaaaatggtcaccaagtttctgattgaaactttttctctcagcaatttggcaagcaccttttgaatatcgccgacagaaagagggtttggcgtgacttcctcaacaagcacaggataattttccttcagatgatcgatcagctgcttggtttcctgtctgccgaccagttcatgggcgtgctgcttaattttttctgtaatatgcgtagatacgactgatgccggatcaacaactgtataccccagcatgtccgcttcatcttttgcagcttcgctgatccattttgcgggaagtccgaacgacggttcaatcgtttcaattccttcaatgacgtcatcttcaggcgtcggtgacatcgctaagtaatgatccagcaggagctctcctttagcgacttcattgcctttaattttcaatctgtattcattcggctggagcgcgatgttatctctgatgcgcacaaccggaatgacaagtcccaattcaagcgcaagctgacgtctgatcatgacgatgcggtcaagaagatcaccgccctgccccgcgtctgcaagcggcacgagtccgtatccgaactcaaattcaatcggatcaatatgtaaaagctgcacaacgctttccgggcttttcagttcatccgcctgagcctcttcttcaagaatttcttcctcttcttcgctcggcttatccgctttggacagcatgtaagcgccgaatgcaagcagaccggcgatcggccccgtcagcagaatgccgatcggtgtaagaagaccgagcaaaagtacagttcccgcggctacatacaagagcttcggataagcaaacagctggcctgtaatatcatgaccgaggtttccttcagatgccgctctcgtcacgacgatccccgtagccgttgaaatgagcaaggccggcatttgagaaacgataccgtcaccgaccgtcagcattgtaaagtgagacgcagcttcttgtatgctcatcccctgctgcagcatgccgattacgattccgaaaataatattgatcatcacgatgatgatacccgcgatggcatcccctttgacgaatttgctcgcaccgtccatggcgccgtaaaaatccgcttcccgggcgactttttcacgtctgtgctttgcatcctgctccgtaatcatgccggcatttaaatccgcgtcaatactcatttgctttccgggcatcgcatcgagcgtaaatctcgccgccacttccgatacccgctcggcgccttttgtaatgacgataaactgaataataatcaagataatgaagacaacaagccctaccagcacatttccgccgacaacgaaattcccgaatgtctcaacaacctttcccccttctccgtgagaaagaatcgaacgtgtcgtcgacacattgagcgaaagccgaaacagcgtcaataacagcagcaatgacgggaatatcgagaattgcagcggttcttgcatattcattgtggtgagaagcacgatcaacgcaagagagatattaatgatgatcaaaatacttaacaaccatggagggaatggaatcaccagcattgccacaatgaggacaacacttattaaaaccgataaatctcttgttgacatgctgtttttctctccttttgaatctgaaattcactatactttttgtttcgttttatatacataagccaaaatttccgcaatgactttgaaaaactcttccggcacggcctggtcaatgtcaacctgatcatataacgcacgcgcgagcggcctgttttcaatcgtcatgacatcgtgttctttggcgatctgcctgatttttaatgcgagatggtcgacccctttggcaacaatgtaaggagcgtccattttcttttcatcatattttaaagctatcgcataatgggtcgggttggtaatgatgacatccgctttcggtacttcctgcatcatccgcctcatcgccatttcccgctgcttctgcttaatcttggacttgataatcggatcaccctccgattttttgtattcatcttttatatcctgttttgacattctgatatttttctcataatcaaaacgctgatataagtaatcaagcccggccagcagcattaaagcccctgatcccgcaagccccatccaaagagtgagcttggaaacgaaagtgagcacttccgcaggagtcaaaagcggaaggcggagaatatcgccataatgcagccagagcaccataaaggcggcaaaaccgaccacagtaatcttcaaaatggatttgaccagttcaacaatcgccctcatgctgtaaatccgcttaaatcctttcagcgggctgagcttattcaagtcaggcttgaggacttccgcagaaaacagaaaacccacctgcatgtaattgctcacgacacccgccacaagcgcgaccagcataatcggcgcgagaatgaggctgatatctttcaccgtatccacgaacagttcatgcacggcagatgctgacagatgtaaagatatcgatttcgtataaaacgttttaataaaggacagcagcctgtcccgcatataaggaccgagcgcgatcagcgaaagaaagataatcagtaaagaaacggctgtattcacatccgtacttttcgcgacctgtcctttctttcttgtatccttccgttttttcggcgtggctttctccgttttttcaccggcaaagaattgcagattcagtctgagcctcatcatgtcacaccgaccaatgccaatagattccgcatggtttcaacggtaaggctgaagatgttgcggacaacgacaaacatcaccgccatacaaacgatcagcataataaagctcacggctattttcagaggaagcccgacaacgaaaacattcagctgcggcaccgttctcgccacgataccgagcgccaaatcaactaaaaacagactggccacaaccggcgcagacatttgaaaagcaataataaacatggcattgaagctttttgcgataaaaagtccaaagtgatcatttccaaacgacggaaatgcctgatcaagcgggatatactgaaagctgtaataaatcccgtccaataaaagataatgggcgtttatgctgagcataaataacagcgccagcgtataaacgaattgtccgatcagcgggctttgcgttcctgattgcggatcaatgacattggcgatggaaaagcccatctgaaaatcaataaaggaacctgctatctgaatggctgtcatcatcatgaaagcgatcagcccgaggctcaagcccacaacggcctcttttatgacaagcagcatatactgttcccctatttctatttccggcgcatgtttcagcgtgctgaagcagatcaccgaaagaaaaaaagcaaagccgattcggtgaaccgccggcagattccgatgtccgaacaccggcaccgttacaaaaaaagcagagattctgataaagaccaataaaaaagcgggaaataaatcaatgatggaattcatttgattctaccctgcaaatcggttcagatgagaaaacagatcagttgtgaacgaaagaatcgtcgacagcatccaaggaccgaaaaagatcagtccaagcatcaccgccacgattttcggaatgaacgcaagcgtctgttcctggatttgagttgtcgcttgaaagatactgacgagcaaaccgacaatcagcgcgatcgcaagcagcggcccgctgatcattagtgttacatatacggctttttccgccatggaaattacaaattctgaactcacaattagcacctaccctaaaagctgtcaagcaaagatttcacgattaaataccatccatcgaccaaaacgaaaagcaatattttaaagggcagagagatcataaccggcggtagcatcatcattcccattgacattaagacgctcgccacgaccatatcgataattaaaaacggaataaaaatcataaagcccatttgaaaagcggttttgagttctgatatcgcataagcgggcaccatcgtcgtcaaaggaatatcctgaatcgattcaggttttttcattttggcatagttcataaacagcgccagatccttctgccttgtatgcttgctcatatactctttaatcggcttctcggcttttgtatatgcttcatcgagactgattttattgtccatcagcggcgttaaggcttccttattaatctctgaaaaagtcggcgccataataaaaaacgtcaaaaacagcgcaaggccgattaaaacctggttgggaggcatgttctgcgtcgccagtgaggttcttacaaaagacaggacgatgacgattctcgtaaagcaggtcatcaaaatcagaatccccggcgctactgaaaagacagtcaaaagcagcagtaatttaacagtggagctgacttcggtcggactgcttgaattaaaaagattaataaattcattcatgatgataagggcctttcttctttccttcagaacggctttgtttcagctcgttcagctgttctttcagcgcttttgaaaacgacggaagcatcgtttgcggctttttttctccatccttacgccgatttacgagcttggtccattccacttttgaagacatcgactcttcgtattggctcagaatcgcctcgcgctctttttcatcttcaatttcttttaaaagctgtatcgtttcgcccacaccgactacgagaacactgtttcccactttaatcagctgcacggaacggttttggccgactgacgttccgccgatattttctacatattgaaacggcttcagcagacggtttcttctattcatcagtttgacaaatccatagatcagcagaatgacgaataataacgccccaatcatctttacaaaatcaaaagcggagacagaagatgcagaagcatcccctatctcttgatcagccgtttgtttcgatgtatcgctttttttctctgttttgtttgttgattgtttgtcaaaccattcgttgacggtggaattgtcagactccgccgcaaaagcagggaacggatgtacattgagtaaaacgaaacaacaaatcaaagctagtaaaccatgactctttttcaacagtcgtacaccctttagcttaatgttttattaatagcttcaagcacgcggtccgcttggaacggtttcacgataaagtcttttgcaccggcttgaatcgcgtcaataaccattgactgctggcccatagccgaacacatgatgattttcgcctgcggatcgatttgtttaatttcctttaaagctgtaatcccgtccatttcaggcattgtaatatccattgtcacaaggtcgggggaatgctctttgaatttttcgactgcctgcgctccgtctgaagcttcagctacaacgtcaaaaccgttcttcactaaaatatccttgatcatcattctcataaatgctgcatcgtctacaattaaaattctgtgtgccataatctgtttctctcctctatgttcgcttattttaaattgttaaggcggtctgcctgacttaaaatatcagtgactctcacgccgaagttttcttctatgacaacgacctcgccctttgctacgatccgctggttgaccaggatgtcaacaggttcaccagccagcttgtcaagctcaataatgcttcccgcagaaagttcaaggatttctttgacgcttctcttcgttctgccgagctcaaccgtaacggaaagcggaatatccatcagcatatcaaggttattccttgatccttgcgccgcttcgttatgatcaaatgcctggaattctaccggagcgacttgaacaggagcagctttttttgcggttccctgtctcttcggaagctcgggttttgcctgcggctccggctgcatggcaggttccggctgcggcgtttcgtatgtttcctgtggttctgatacggtttctgcggcctctgactcatgctggtctgcagtcatcaggtctgcgatcagatctttcgcaaacgtaatcggataaagctgcatgatgctcgaatcgattaattcgccgactttcagacggaatgacacttttacgagcaggtcatcctcaggtattctgtcggtccctttttcttccgtcacatccagaagttcaacccttggcggagaaatgtcaatctttttactgaacacggtcgacattgacgtagcagccgagcccatcatttgattcattgcttcctgcacggcgctcaggtggatttcaccgagtgacggatcggcgccccggccgtccccgccgatcatcaaatccgcgatgatggccgcgtcgctttgttcgacgacgagcaaattgctgccgtcaaagccttctgtgtagttcacttcaatggcaacatacggatgaggaaattcatcactgattttgctttttgaaatgacggtcacactcggcgtcgtaatgtccactttttgatttaaaagagtggacagcgccgtagccgagctgccgaacgaaatattcccgatttctccgatcgcatcgcgctcaagttcagacaagttcgccccttgaggctgttctgtatcctctgactgactgcttgtgccgttaagaagagcatcgatttcatcttgagataatctattgttcatcttgttcacctcttatgtcgtgatctaaaatttgcactgcctgtcttcgattcacccggccggcctgccctaaaaacttcggtttgtttccgaccaatacagtaagaggatcagtcactgatttgtccagagttatacagtccccgacttccaaacttaaaaattcttctattgtcagttcagaagcgcccaagagagccacaacgggaatttgagccgtcatgatgcgcttttcaagcaacttcgtttcttcgggcttcgcttcattccggtctgattgcatccaataatgtacggaaagcttagggataatcggctcaagtacgacatggggaatacaaagattaatgacaccgctgatttcacctatctgcgtattgagagaaatgacaacgactgtttcatttggggaaaccatctgtacaaactgaggattcacttcaaattcagtcatttcagggtcaatatcagcaatcgattgccacgcttctttgtagttgcccagtgcattttcaaataagttagaaataatattcgtttcaatttccgtaaggctgtcagctttgttatgagtgatgccgatgcctcccatgacgcggtcaagcattgcgtatgcgatggtgggattaacctccatcatgattctgccttccatcggatgaacatcgaataaatttaaaatcgtcatgttcggtatggaacggataaattcttcatacggcacctggtcaactgagctgacggatatatgaatatacgttctgagcttggcggaaaagtgtgttgtgagaagcctcgcaaagttatcatgtatccgggttaaactgcgtatctgatctttcgagaatctgagagcccgtttaaaatcatatacctttacttttttctctttaacttcctttttcagctcttccgcatccgcctcacccgtggaaatggcggaaagcagtgcgtctatttcattttgggagagaacttctcctgacattttcttcacctccgtattctgtcaaatttgtttttattgcagattaaaggaggtaatgtacactttctgaacttttccttcttggagatagctgtttactttctcttttaatgattgtttaaacgcttctcttcctttatctccctcaatctctccggcgcttgtgccggctaaaatggaaatgatgttgtctttcacctgaaaatcgcgtttttcaagttcttccttcgctttagccgagtcggtttcaagcttgatgccgatacggatgatgctgtcagactttaagtttgtcgtaatatcgtcgacagacacagtggctgcaacgacttcgtcaattgtcggctttttatctttgccggaatttccgctgacgacaaaatatgctgccgttccgaggccggcgatgacaattaaaataatcagcaaaatgatgactaattttttcttcattcttcttcctctattccctgatccagtgaaaatatttgtatactatggtaaaacgatatgacttttttgagaactgcttcttccggttctttcactacgaactttttgccgttggacagtgtaatcgtcgtgtcggggaagcactcaatctgttcgataaacagcgcgttcagcgtaaaaggctggccgtttaaacgggtgacttgaatcatgcaatccggagaagcggcctaaccgcctctcctccctccttaccgtttcagattaaccagctcctgaaggatttcatctgaagtcgtaatgatttttgagtttgattggaaaccgcgctgagcaacgatcatttcggtaaattcatctgtcagatctacgtttgacatttcaagatagcctgccaaaagcttacctgttccgttttcgcccggagtggtgactgcgcttgcagctcctgaacttaatgattctctgtaaaagttgcctccgattttttccagaccggcgctgttagggaacgtgaccagaccgatttgtccggcatcatgaacctcatcccctgcatcagtgtatgtaacggttccgtctgcaccgatgctgtaatctttcgcatcagtcggaatattgattttgccgccgccgattttttcaagatagtatccgtcagtcgtaacaaggttcccttgattgtcctttccgaaattccccgcacgtgtgtaaacaattcccgcacctgtattaatctgaaagtagccgtctccgtcaatggctaggtcggttttattctgtgtagcctgcggggcgccggttgaatgaacaacatcaatggaagaagtcgcggcacccaagccgatttgttttgaattggtcacgtttgaaccgccggcgactgtctggctgatcatatctttaaatgtaacgcggcttttcttaaatcccactgtgttgacgttggcgatgttattgccgattacatctagttttgtctgaaagtttttcatgccgctgataccggaatataatgaacgtaacatgttaaattccccctgagtttcttattatttagatgtttcgctgacggccgtgacattccacggactgacctctttgccattttcaagcacgagcacgtaattgccgtttgaatgcttgactgaattgactgggcttgtctgatccttcccgtcgctgtcgctgaatgtgacatttttgccgatccagttcacatacatcgtaaacggatcttgattttctacaaatttagtcatcgtcgtattcatattcatcatttgctccaatgaagaaaatgtcgccatctggctgataaattctttgtcatcaaccggattgagcgggtcctggttttgaacctgtgtcattaagatcttcagaaattcgtctttccctaaattcgtgctgctgtttactgcggcggtgctcttcgcgcttgaagtggttgaagcgcccgccgcggcataatccgagtttactgatgtcaactattcttcctccatttcattgagagaaagctcctccagcatatctccgaaatcgcctgactgctgctggttcttctgctctctctgtccctgatgctgctgtttattgtgatcggccgtctgcccgtaaacaggctgctgatccccgctttgaagcgggactgtaaaacggtcgacctggaccgacatattcggaagcgactgtttcagctgaggaagatgctgttccagcagctctttcgcggactggctggatgcgattattttgctttgaaacatcccgttttcgtttgtcaccttaattgtgacaaatccgaggttctcgggattaagacgaatcgtaaagcttccggttgttttcccgaaaggcgtgtatttcatctgtttccagccgctgatgacctgatccgttaacggtttattttctgccggctgctgttcagctcctgcggacgtttgctgaatgccggcaaggcttctcgttcccgaaaacagtatatgtgcagacaatttgctgtcaggcgcctttgcgtgagaaaccgtgccgccgttttgctgttctgtttttccggctgactcttgggatgattcagatgattgagataacacaaaagctttcagctcagtttcagccatatcccattcctttgttcccttttgagaaaggcccgcaagctgctccgcgacgctttgaaagctcttcagctcagcggctgtcatggagtaaagtttagatgcagattcgtttttcggaaaaaatgtctgccgcaggtcttgaatcacgcggtctgggacaccttgttttttcaatgcctctaataaacgggcgccttcctggtaaaccgcctttgcctgcgcgctgtcaggcagttcctgctgagatgtgaagagctgggatacggcttcttgaatgaaaagcagacccttctcaagcgcatccttgacggaatccccgtcttttgcgaaagaatccggctcatccgtttcaggcttcgccccatgctttttccccgctaacatgtcttcaacagattcggcaagctgtttcaataaaggaagagctgtttcagccgtctgctttccttcaagagcttttaccgcctcaagcagctgttttagctgcaattctttatcttccgggccggctttcagccaatcaccgattttcgatagggcatcattcagctcagcgtcacttgttttggtttcatctccgggctgccggggagaagtgatttccgacaggagccagttctgaaatagacctaagctgtttacattcatcttcacattgctgttttgtgcagcctgcgtacgattacccgttaattcaagcagcttcaacttacatcactccttatttccgtcagcggatagtttttctgtatatttagccgcttgttcaggagtcattttcgtcaagatttcagcaagctgctttttacttaatccgtttaaaatatcgagggcttctttttctttcagctttacgataatgcttgccgctttaccgctgtccatacttttatagatgttgatcattttatcttttccggctgaatccgcagcgtcttttttcgtttcatccgtcttcgttttctgctgctgttcagcttcctgtttcagtgaacggattttctgattcagattatcgatttcggacttgcttgtgtctaaatctttattcaaaatgttaatttcacttttttgttcctttatggtcttttcaagagaagccgttctgtcttccttctgcttttcccccgcgcttttcatttctttcgtttcgggaaccaattcttttaaaacaggcgttttagcggctgtttcctgaatcggcttcatcacatcaacgccggcagcccaaaggatgatgcttgcgacgatgatcagaaaaatcagcgggatcatgataaaaagcaggattgaaccgaactttccagatctcttttctttatcggccatttcattcgctcctaatgcccctgaatcataaactgcttgattgaaatgtcgtccatttccctcatctctgcagctttgtcttcaagtgcgaacatattaaattgtttttcccgcattttttcaaatttctttacttcaatgtttttttcggtgagctgttcctgcttctcattcatttcatttcgtttcatgatgacaagcttttgataatgatagatggtgttctcaagattggaaacgaattgctgataatgtctcatttcctgaacgctcatcccgcatttaagctttgattctttgtctttttcgagcaattcttttttgctcatattttcatatagtttttcagccactgtctcaaattcagaaaccgattgtctgtattcagtcaatgtttggtctttttcattttcttttaattccagcagcttttgaaatctgaattggtatgccacgatgtttattcctcttttcctgtcagactcgtcaatgccgcaatgctgtcttccaattgagcaggttcttccgttccttgttttaaaaattgaataagctgcggataaaactgaatcgcttcatcaatttctcttgatgatcctcttttgtaagctccgatattaatgagatcttcagagttttgataagttgacagaagatcgcggaatttgttggccgcctctatatgcgctgtgtctgaaatattagacatgaccctgctgatgcttttcaggatgttcacggccgggaactgccctttgttggcaagcgcccgatcgagaacgatatgcccgtctaatattccgcgcaccgtatcggcaatcggttcgttcatgtcatctccgtctacgagaaccgtataaaaagcggttatcgttccttgttcattcgcgcccgttctttccagcaaacggggcaaaatagcgaacacagaaggtgtatatccttttgttgtcggcggttctcccgctgccaggccgatttcccgctgagccatcgcgaccctcgtgacagagtccatcatgaacatcacattccggcctttatcgcggaagtactctgcaatggcggtggccgtatacgccgcttttaaacgcattaaggcaggctgatcagaggtcgcgactacgactatcgagcgtttcaggccttcttcacctaaatccttctcgatgaattcacgcacctcgcgcccccgttccccgacgagtgcgataatgtttaaatcagcttcagtctgcttcgcgatcattcccatcagggtgctttttccgactccgcttccggcaaaaatcccgattctctgcccttttcctaccgtcagcagactgtcaatcgatctgacgccgacacccatcttttcccgtatcggcgggcgtttcatcgggtttggcggcggctgttccgtcgaaacgggggacaaacctttcggaagcgcccggccgtcaagaggttcgccgaacgcgtcgacaacttgtccgattaaacccgcgcctactttgatgcggagcgactcgccagtggcctccacaatgctgcccggcgcgatgctggccgcttccagataaggcattaacagaatgttttcatcttggaagcctacaacctcagctttaatcgcttttctcgcatggcctttcggataaatgagacaaacatctccgattgagctttcgggcccttttgattcaatcatcagcccgatgacccgtttaaccttgccgtagcgcttgtacggatccgctatttcaattgagtctattaaatactgtgtcttcattgctccgctcccgcctcaagcgccgttaaaagtttttgctttaattgcatcagctgggtgtctatgcctgcatcaacacgtccgaacggagtttctatcgagcacgttcccttcgcggctttttcatcggcatataagcttaatctgcattctttgtataacagctgctgaatttcgtccatatgctgatgaaccgtctcataatattcagggtccacatagatggagatgtcatcataatcttttacttcggctactacctgtttgaccagcagaaggaaagcctctttatcatcacttttttgccgccatacttttttagcgagcgcaacggaaagctcaatgatttcttcctcagcgctttccagtttttcctcgactgactgtctcgccatttccataacggcattggcccggctgatgagattagcgtattcagcttgagcctcggcttttcccaatgccatgccttcttcatatccttctgcctttgcttcttctatcaatctttgtttttcttccgcccagcggtttttctcttcttcaatctgcagaagagtgtgctctaattgatttttcgcttcttcagacaccctgtcggcttcggccttggcaaaggccatgagagcctccggattttcgggttcctcccggtctggatgggaatgtgatttcctgacttcctgcaaggaaagcttgcgccgtttttgttcaggagaaaatggtgattgctgtttaatgatattagacaataatatcgtctcctccgcctcgcgcgattacaatttctccggcttcttccagcttgcggacgacgcccacgattcttgattgcgcctcttctacatcacgcaaacgcacaggccccataatttccatttcctctttaaacgtttcaaccatacgctgtgacatattgctgaagacgatctctttgacttcctcgctcgcaaccttcaatgaaagcaggaggtcgtcgttttcaacatctctgatcacgcgctgaatcgcacggttatcaagggtgacaatatcttcaaagacaaacatccgttttttgatttcatccgccaattcaggatcttggatttccaatgaatcaaggatcgttttttccgttcctctgtctacgccgtttaacacttcaacaacggcttctatgccgccggtctgcgtataatcctgcgtaaaggaggaggacagcttttgttcaaggacccgctccacttcatttatgatttcaggagacgttctgtccataaccgcaatccttcttgccacctcagcctgaacgtccgggttcagctcagacaaaatctgtccggcctgcaccgggtcaaggtaggataaaatcagcgccatcgtttgcggatgttcctgctgaatgaaatttaaaatctgttcgggctccgcttttctcgcgaaatcaaacggctttacctgcaaagaagaggtgagcctgtttaaaatgcttaccgctttgtcttctccgagcgctttttcaagcacttggcgggcgtaatttaaaccgccttgtgaaatatagtcctgagcgattgcgatattatgaaattcttcaatgatttcatcttttctttgatgatcgacgcttctgacccccgaaatctcgagtgtcaatctttcaatttcttcttcagacaaatgcttgtacacagaagctgatacatcaaggcctaaggaaatcatgaggatggctgctttttgttttcctgtaagcttgttctgatcacgtttcgccattttccactccccctaatcctcgtccagccagcttcgaagcaatttagcaaagtcttccggtttttctttagccattttttcaagctgttttcgtctgactgtttcttccgtttcaattttctcttcgttgatatcaggcaatcgaaccggctcgggcggtgtttcatattcatattcttcgtattcatcctcttgtgagcgtttctttctgatgaggagaataataagcagaataatggccgcaagcagtacgccgcctgtaatgtatacccagatcggaagacctgaagattgtgccgaatctgtgttcaggcttgtttttccgtcaaacggctgaacggatacaacgattttattgttgatatcattgtctgtcaggttttgattttgcgtttcgtttttatcaagagacgttctgacgaccgttcctaaaatcttctgtatatcagcctgtctctgtgctgataaggaagcggcatttttcggattaggcggctccaccatgacctgaatgcctaaatcacgcactttatacgggctttcagcgatttctttatgaatgcggttgacttcatagttgattttattgctgcttttttcgtagtccccgctgtttgaaccgccgtttgtctcggcatagttcgcggtgtcattgcttcccgttccggccgtgccgccgttggccgcgccgtcgcctttatacgtttccgcaactttttcgacgcttaccgctatgccttccatgttatctttatcgacaggttcgacagtgtcttcagtgcgtttttccttcgtgaagtcaacatccgccgtcacggaaacaacgaccttatcctgccccatcattgtgccgagcagtgactgaacatgtttttgaatgtccttttcgacctgcgacttaataccttgctgagaagcataactgtcagaaacggaccctgcaccgctgtcacttttgtcataatatgtagaattttgatccattatgacgatattatcttcttttaagttcggaacacttttagaaacgagatggtacagcccgttgatctggttttgatcaagcgagtagcccggtttcatctgcaaaacgattgaagcggacgctgccggctgatcttcaccgacgaacacggcttctttcggcatgttgatcatgaccttcgagcttttaataccgtccatttcatttatcaggtttgacaattcggtctgagtcgcctcaacctttaaaacgtcaaactcattatccgtcaggccgaagcccgcattttgtccgaaaaacgaataatcaattgatcccgttttcggcaggccttccgcggcaagctggactttaagcgcatccacttggctctcaggaaccttaatgaccgtgccgccgtcagcaagttcagaagacacctttttcgtatcgagctcttctttaatcttccccgcttcttccgcggacaaatctttataaagaggcaccatcttttcagacgaagtaaaaataataacgacgatgagtaaaataatgaatgcggccaagccgcttaccatgagtatcttctgtgtttttgatctgttgttccaaaacgctgccgttttggttttcatttgcattagagtacgattcatgttaacccccggtcattccagtcattctcttcaatctgaccactacatctgcattctcatgatttcctgataggcttccacggctttattgcggaattcggtagcggccgtcagagaaatatttgctttttgggcagcgatcatgacctcgtcaaggtttacatcctttcctgcagccagttcgttcgttatttggtcagatttcacttgtgactcatttaacgaatcaatagagttttttaaaagctccgaaaagcttgtttggtttgaagaatcagttttttgagtttggtttaattgattcgttacgttttgagtattttgggtttgttgaagctgaaaaggagtaatagcgttaaccacttacatcaccttactttccgatttctaacgccttcaaaagcatgcctttggaggcgtttaatgcagttacgtttgcttcgtatgatctcgagctgctgacaagatccaccatttcctttaatggatctacatttggtttttgtacatatccgtctttattcgcatcaggattctccggatcataaacgagattaaaagcggacgggtcttccgtaacaccagatacctttacgccacttcccgcgcttcctgttccgttcatcttggaatgtaaaagggacgaaaatgattcgcctccggattggagagataccagctttcttctgtaaggcacccattcgccatttacctgcttcgctctcgttgtatccatattggccaggttggacgatacgacgtccatccggacacgctgtgcagttaaagcggaacccgaaatatttaagctttgaaagccactcattattttcctcctgtcaagacggttttcagagaattgaatttgccgctcattctttcaaccaaagcctgataattaatttggttttcggctaaatctgtcatttctttgtcgatatcgacattgtttccgttttgctggtacgatgtatcactgctggacacgatagaataatcgtcccccgaacccgtaaagtcaacgtgccgatagtcggtttttacagcctcaagattggatgtttcctgatctaacaaatttcggaaagagactttttttgccttatagttcggtgtatctatattggcgatattattagttaagactttttgcttaatgtccgctctccccaaggcattctcaagattttgtatagttccagaaaataagtccaaatccacttacctccatttcagatatttttctcctaaaaatccttgtcgagaattgtaaaaccatatgcttattgtaagaaataacaggcttaaagtctatgaagttaggctaaaaaaaagtgctcaattatatctattttgcatgtaggtattaagtcctagaatatttgtactacaaggatttgtttaatataagactgaaaatagcagaatttctgtttcttcctccttttttcacacagcaagatggattatctcagatcagattccaataagcaactttaaactgcaacttttcacctattgtccataaaaaaagcagaacccccatttttagggatcctgcttttgtcttaatgagatttaaggttttccaattcaataaggaatttgttgttcagaactttaatgtacgtccccttcattcccagtgatctggattcaatgacgcctgcgctttccagctttctcagcgcgttaacgattactgaacgcgtaatgccgacacggtccgcaatcttacttgccacaagcaagccttcgtttccgtcaagctcttcaaagatatgctcaatcgcttcaagttcactgtaagacagagaactgatcgccatttgaacaaccgctttgcttcgcgcctcttcttcgatttcttccgctttttctcttaaaatctccattcctacaacggttgctccgtattcagcaagaatgagatcatcatcttcaaattgatcctgcagacgggacagaatgagcgtgcccagtctctctcctccgccgatgatcggcacgatcgttgttaagcccgcttggaacaggtctctgttttctacaggaaacgccgtgtattcgctgttgatatcaaggtttgaagacgtctccggaacattgaacagatttctcgtgtactcttccgggaactggcggtcttcaagcatttttttcatgcggtcattttcaatctgctgattaatagagtagcccaaaagctttcctctgcggctgacgacgaaaatattagaatcaatgacgtcacgaagcgtttcagccatttctttaaagtttacgggtttgcctgccgcagcctgcagcatgctgttaataattcgtgttttttgtagtaaagccatgataaataatcctcctagaattcctcttattaaattttcacaatataaattgacttagatctttgttgtttgcaatcgttccgagcttttcttcaacgtattgcggcgtgatggcgactttttccatcgtaacgtccggcgcttcaaacgacaggtcttccaagagacgttccaatatcgtgtgaagccttctcgctccgatgttgtccgtatcctgattcacatgataagccacttcggcgatcttacgaatagcttcgtcagaaaattcaagagatataccttctgtctgcaataaagcctgatattgttttaacagcgcgttatcgggttcgacgagaattttcacaaaatcatctaccgtcagcttgctcaattctacacgaatcggaaagcggccctgcagctccggaatcaggtcagacggtttggccatatggaatgccccggctgcgataaacagcacgtgatctgttttgacggagccgtatttcgtgacgacggtagatccttcgacaatcggaaggatatctctttgaacgccttctctcgatacatctgctgaggaagaagcccctccgttttttgcgattttatctatttcgtcaataaagataatgccgccctcttcagctcttaacacggcctcttggccgacttcatccatatcgattaatttgcctgcctcttcattggtcagaaccttccttgcttctctgaccgtcattttgcggcgttttttcttttttggcaccagattgctcagcgcatcctgcatattcatgcccatctgctccatcccggagccttgcagcatgtcaaacatcgacggctgctgctcttccacctctacggagacgtaatggtcttcgagctctcccaatgcgagctgatgcgccatgcgctttcttttctcttcaaggcttgcttcttcctgctggtcggcttcatcatcatttgccgcctggcttcctccgaaaagcatttcaaacggatttttcacacccgcttgttttttctttcccggaacgagaagccgcactatacgtttgtttgcattttcttcagcctgttctttcacttcgctgattttttcttctttaatgagccgcacggatgtctcaacgaggtctctgaccattgattcgacatctctgcctacatagccgacttctgtaaattttgtcgcttcaatttttataaatggcgcaccggtaagcttggcgatccgtctggcgatctctgttttccccaccccggtcgggcccatcatcaggatgtttttgggaacgatctcgtctctcagtttttcatcaagaagacttctgcgatagcggtttcttaatgccacggcgacagcttttttcgcatcctgctgtcctacaatgtattgatccaaccgatctacgatttgtctcggtgttaacggtttgttttccatgcgcctcaagtcctttctattcaagttcttccaaaatgatctgatcgtttgtgtacacacaaatctcgcccgcgattttcaaagcggcttttgcaatatctttggcggacagattctctccggcataggttttcagcgctcttcctgctgacagggcgtagtttccgccggagccgattgccaaaatgccgtcatccggctcaatcacttcacctgttcccgatacgagaagcaaggtatcctggttcatgacaatcagcatggcttccagcttgcgcagcactttatcgctgcgccattctttcgcaagctcaaccgacgcacgttttaaattgccgttgtattcttcaagcttcgcctcaaacatttcaaaaagtgtgaaagcgtctgcaacagatcccgcaaatccggccagaacctttccgttaaacagctttctcacttttctcgcggtatgtttcatgactacagcctgaccgaatgtgacctggccgtctcctgacatagcgcttttcccgttatgctggacggcaaaaatcgttgtcgcatgaaaagatgacatgagaagggcctccttttaattttctttaaaagctctcgggtggtgggacatatatgtgtttctcagcatttccttcgatacatgtgtgtatatctgcgtagaagacagattggaatggcccaaaagctcctggacgcttcttaaatcaaccccttcattcagcagatgagtcgcaaacgtgtgccgaagcatatgcgggtgtatatgtaaagtgccagatgctttttttacaagcccgcttaaaatatacctgattcctctggcggtcagcgggccgcctctttgattgacaaacagcacatcatgaggctcttttgctttttcaagcaggcactgccttccgctgttgatatacagctccagcgcatcacgggcatatgagccgaacgggatatagcgctgcttcttgcctttcccgtgaacgagcaccgtatccatgaacaggtcaagatcgccgacagtgagcgtacagcactcactgaccctcattccggtcgcataaagaagctcaagcagggcctgatcgcgcatccctgacggctgacttctgtctgaaacagcgaatagttcctcaagttctttttcataaagaaacttcggaatccgtttctcttgtttcggcagatgaacaagctgaaacggattctcttcaacaagcttttccctcattaaaaatttatagaagcttctcaaagctgaaattttcttgctgattgtttttcttgacaggcctttttcataagcctccgtcaaaaatattctcacatcatgatatgcagcttctttcattccatttatattttgagcatgcagaaacatcccaaattcttcaatcgaattaacataattcacaatagtatattgtgaataatttttttcaatttgtaaatattcaacgaataactttaaaaaaaagttaacattctcagtcattatgaagacctccctctccgaagggcttttaaatggtatcatataatgcatcgaagttgcaatgaaaagctatatcgttttcgaaatagtttgaatagtctcaattgcgcgtttagcgtattcttcatttcgttcttttttgtttttaatttttacaggcaattcttttaagaggccgaagtttgcattcatcggctggaagttcttctgatttgtcgtcgtaatgtagtgagccatgcttccgatcgccgtctcctgcgggaatgtcacaagatcctgaccgagcacaagtttggcggcattgattcccgctacaagacctgaagcggcagattcaacataaccctctacgccggtcatttggcccgcgaaaaacagatcgttccgctgtttaaattgatatgtcgggttcaaaaggctcggcgagttgataaatgtgtttctgtgcatgacgccgtatctgacgatatcaacattttcaagaccggggatcagtttaagcacttctttttggtctccccattttaaatgtgtctgaaaacctacaatattataaagcgttcccgccgcatcatcctgtctgagctgaacgactgcataagggcgcttgcctgttttcggatcttccagtccgaccggtttcatcggtccgaacagcattgttttcttgcctcttttcgccatgacttcaatcggcatgcagccttcaaagaagatttctttctcgaattcttttaaaggtaccgtctcagccgtcgtcaatgcttcatagaaacggtcgaactcttcctctgtcatcgggcagtttaagtacgccgcttctcccttgtcataacgggattttaagtacactttctccatatcgaggctgtctttttcgacaatcggcgccgccgcgtcataaaaatacagatactcttctcccgtgagctctttcagctgctgagaaagcgattctgacgtaagcggtccggtggcgataacagtcgggccttccggaatctctgttacttcctcagtaagaaccgttacgttcggatggtttttcacgagatccgtcacgctttgcgcaaattcatgacggtcaacggcaagcgctcccccggccggaaccgagcatttatcagcagattgaatgattgccgagtcaagggcccgcatttcttcttttaatacgcctaccgcattggcgagtgtatttgaacggagggagttgctgcataccagttcggcgaatttatcagtatgatgggctgccgtctgcctgacgggccgcatttcatatagtttcacttgaattcctcgttttgcaagctgccatgccgcttcacttccggcaaggcctgctccgattacattaactgtttgctggttcatttcttttcatctcctgttgtttgtcccttccacacaaagaaggtgagcaaggctctgctcaccgctacttctgtggttcttccttataatcgcattcgacgcattggacttgtatgccttttttaagctttttctctacgagcatattttcacatttcgggcattttcgttcaatcggtttgtcccaagatacgaagtcgcattcaggataacggtcacagccgtaaaagatgcgtttcttttttgattttcgttcgacaatgtttccttcatggcacttagggcattttacgccgatttgtttgacaatcggttttgtattccggcagtcagggaaattggagcacgccataaatttgccgtatcggcccattttataaaccatccgggagccgcataactcacaatcttcatcggcgtattcaggttcaatttccacttctttcatttcggcttccgcttttttcacgcgtttttcgaaatcagtatagaagctgtcaatgatttgaacccattctgtctggccatcttcaacatggtcaaggtctctttccattttagccgtgaattcaacgttaatgatttccgggaaaaactccatgataagatccagcacgatctgcccaagctcagtcggcacaaaccgtttattgtctaatcccacgtaaccgcggcgctggatggtgtcaagagtcggcgcatatgtcgaaggacggccgatccccagttcttcaagcgttttaaccaggcgcgcctctgtataacgcggaggcggctgagtaaagtgctgctcaggctcaatatctttcgataaaaccgtgtctccctctttaaggtccggaagcatgcggtctttttcttccagctgatcgtctttaccctctacatagactttcatgaagccggcgaatttgactttacttccgtttgcccggaatgtcaatccgttattgctgagatcgacgctcatcgtatcaaggacggcaggggccatctggcttgcaacaaagcgctcccaaatcagcttgtataatctgagctggtctcttccaagcaccgcttttaagtcggcaggttttctgagcaccgaagtcgggcggatcgcttcgtgggcatcttgtgcgttttcatttttctttgccggtttccgttttcccgctaagtactcttttccgtacgcctgatcaataaaagctgacgcttcttcaacggctgtattggaaatccgcgttgagtccgttctcatatacgtgatgagcccgactgtcccttctttgccgagatcaattccttcatataattgctgcgcgatcatcatcgttttcttcgctctgaaattcagctttcttgcagcctcctgctgcagagtggacgttgtaaacggcagagcgggatttcgtttgcgctcttttttcgtaaccttgtcaactgtatacttattgcctttcagctgagcaaggatggcttttacgtcttcttcgctttttaaaggaagctttttgccgttttttccgaaaaatccggcttcaaacgtctcttttccttttaaaaatgagccggtaatcgtccagtactcttcaggtttaaaatcgttgatttccttttcccggtcgatgatcagccggagcgcaacggattgcacacggcccgcactgaggcctttttttacttttttccaaagaatcgggctgattttgtatccgacgagtctgtctagtatgcggcgcgcctgctgcgcatcgacaagatccatattaatcatgcgcggatgtttaaatgattctttaatggcgtctttcgttatttcattaaagacgacccggcagtccgagctgagatccagatcaagactgtgtgcgagatgccatgcaatcgcttccccttctctgtcggggtcggccgcgagatagactttttttgctttctttgccgctgtttttaattcttttaaaacagggccttttccgcggatcgtaatatatttcggttcaaagttctgttcgatgtcaactcccatttgacttttcggaagatcccggacatgtcccattgaagctttgactttatatttcttccctagataacgttcaatcgttttcgcctttgccggcgattccacgatgactagataatcagacattttcatccccctcaagaggtgttctctctcttttcaagtatcaattcattttagagctgcctttttatggctttcaacatttcattctttatgatgaacgtcattttatacatgaaaataatgtgcaactttaaatcctcactattattaaatattacaataccgtttgtcaaacgatatttcaaaagggttccgtatactgaacgcatcgggcggtcagctctccgtcaatatcctctgcgcataatacagctttcgccccttcttgaatgagttttataggtcctccggaatatggattaaatatggaacccggaacggcaaatacctctctgccttgatcgagagcctggtaagctgtgattaatgaaccgcttttttcttttccctgcacgaccacaattccttcacttaatccgctgattatgcggtttctcatcggaaagtgccattttttcggctttgtttcaggaggatgttctgagagtaggagatggtgttcagccatgtattctgctaacaggagattttcccggggatagatgtgatggaatccgccggctatcacgccgatcgtaagcccttttgccctgatgctcgccttatgagacaatccgtctataccggatgcaagcccgcttacaatgacccagcctttttttgagagttcggcggaaagatgcccaaccgcttttattccgtcttccgtcggtttccgcgttcctacaatcccgatttttctgcctttttcaagaagcagcgtgttcccttttgcatacaagacagccggcggatcataaatcgctttaagccatgttggatagcggcttgatgaaatcggaatgacagtaatgccttcgcggcggtaatcggacagaacttcatcaagttccggatccttgcgctctatttcctgaaaaattgcttccggggctgttttcccttctgataaaacagttaatggatgcggatccggtaaaaaagacagagaatgatcagctttccaccattttaatagaagagacggggaaatgatttgattaatactgcagaccattaaacagcgcgatgcttgatccaaatctggaaacctcctctttttttcagcaaaaacaggaacagccgttacggctgcccctgcttcgatcagtgcgttttgcacgtttcaaataagcctttttcttttaacaccttaatcagcgtttcacccattacagaaggggtttccgcgacttcaattccgcaggcgttcatcgttttgactttttcttctgccgtgccttttcctccggagatgatggcgcccgcatggcccatgcgttttcccggaggcgcggttttaccgccgataaagccgacaacaggcttcgtcatgttcgctttcacccactcagccgcttcttcttcagctgtgccgccgatttctccgatcatgatgacagcatgtgtttcaggatcttcattgaacgcttttaacacgtcaataaagttcgtgccgttgaccggatcgccgccgatccctacagcggtagattggcctacgccggcttctgaaagctgatggacggcctcgtatgtcaatgttcctgaacgggacacaacgcctacatgaccctttttatgaatgtatcccggcataatgccgatcttgcattcttcaggtgtaataacaccagggcagttcggccctattaatctcgttttcttgccttccataaaacgcttcactttcaccatgtccaaaaccggaatgtgctcagtgatacaaatgacaagatcaatttccgcgtcaaccgcttccataattgcgtccgccgcaaacggagccggcacgtaaataactgacgcatctgcgcccgttgtatgaaccgcttctgcgaccgtattgaataccggtacgccttccgcttccgttccgccttttccaggtgttacaccgccaacgatattcgtgccgtattccagcatctgctttgtatgaaataaagcggtagaacctgtaatcccctgtacaataactcttgtatctttattgataaaaacactcattatctggtcccctgcctttcattctttcctaaactaaggatacgattttctgtgcgccgtctgccattgattccgcagatgtgatgtttaagcctgattcattcaggattttctttcctaaatctacgtttgtcccttcaaggcgcacgaccagcggcaatgtcaagccgacttgtctcgtggcttcaacaacgccctcggcgatgacatcgcacttcatgatgcctccgaaaatattgacgaaaattccttttacgttttgatcggaaagaatgattttaaaagcttccgtaactttttctgcggttgcgccgcccccgacatcaaggaagtttgcaggttctccgccgtagtgtttaatgatatccattgtagacattgcaagacccgcgccgtttaccatacagccgatatttccatcaagggaaatgtagcttaaatcgtattttgacgcttcgatttctttcggatcttcttcatctaaatctctgtattccataatgtctttttgtctgtataacgcattgctgtcgaagttcagcttagcatccagcgccatgacgtttccgtcccccgtaacgacgagagggttgatctcggcgatggagcagtccttttcaacaaatgctttgtataaaccgagcataaatttagcggctttgccgacaagctctttcgggatgttaattgcgaatgcaatttcccttgcctgatagccctgaaggccgacagccggatcaattaccgcttttttaattttttcaggagttttttccgctacttcttcaatctccgttccgccttcttcagacgccattaaaacgattcttgaagtagcgcggtcaagtacaagcccgacatagtattcctttttaatatcgcagccttcttcaataagtaagcgttttattacttgtccgtccggacccgtttgatgtgtgacgagcgtcttacctaacagttcttcggcatactctttcacttcatcttttgtttttgcaatctttaccccaccagctttgccgcggccgccagcatggatttgcgcctttacgacataaaccgagcttgacaggctctctgctttttcaactgcttcctctgctgtaaaagccactttaccttcaggaacagacaccccgtattttctgaggacttcttttccctggtactcatggatattcatttcccatcctcctaacttatgtagcaaaactaaaaatagactgcgctttcattctatataatactggaagaattgtctagggttcaaaacaaaatctttatatccttccaaacattctaacttttattttattgaaaatataaatttaaacggagtccgggaaatgaatggtccttatttttcgtttttcagggtttcgtccagtttgtaaacaaatgaaaaaatttcggcaacggtttcataaagcgcctccggtatctgatcgtcaaccgtcaaatggcgcattaattcgacaagggttctgtcttcctgaatgggaaccccagccttctcagcttcttttataatattttccgccacgtgccccctgcctgttgcgacaacctttggggcttggtctttctgccggtcgtaatgcagggcgacagctcttcttaacggcgtttgctctttcatattttcacatccacttttcttccgccgtctttttctataaactcttccacaagagcgctctggtctttcgggcgccgttttttagccgtgacgcctgacaggctgaagcccgtttcttttacagctttttttaaagccggtacgagagggtcgatggccgcctgaagctcaaaatcagtctcaaccgtaatggtcattacattttgctgaatcatgcagtccacaacggtttcttgcagtgtttcaaggtgcagcaaaaacaggagcctgcaatgtgacggatcgagttttccgtccggcttcttccgtcctttaaagagaactgtgatgtcattctcatacgcggacgctcccagcggaaatgacagcaccatctgcgtaacagaaggattatgctgctcaataaacagctggccgtttaatttatgaataagcggttccgcctcttgtttaacggattggggcgcctcttgaagcgtccggacggcttggagggctgttttcagtgcttgtttctccggctgcggagatacgcctttttcaagcgctgtaatgaatgataattcatcacgcgtgcccagtccttttttgattttctgcaaaaggcttaatacatcatgtttttctgcatatttcaattcggtgagctgagcggctttttcaaaaacagccgcctcctgttctgtcagatgtgcgttttgaagaacaggtgctgttttaaatgttttttcttgagaaatgaaagccttaatgatctccgccgttacttttacgggacggttttcagttttttctgccgatgtcattaatttctctataatctgttttgccgttttttcaggcagttccgtatctgtccgtgcactcggaggagaaggttggcttgagactgcctttccgttttcacgagtctctcggacaaatggtgattgttttgattccgtccgttctccttcatccatcagcccggtttctgagagcggcatgcgtgcagcctcggcaagcttcttcaagagacgttctgcatgaagatccgtttccgcgtttaacacgtcagaaatcgcctctttgagcacagacagctcttttgccgattgcggagcctgattgattgcctgaagcagtcctgagaggaggcgccgggtcggaaccggatatttaacggcatgaatggctgacaagacttccggatgtgcgggcagttcccgtttcagcgcaaatacgattgtttccgccgcttttttcaattcggcggccggaagcgattcagcccagcggatgcaagctttgaggctgttttccgtcatcggcagcttctgctgcataaacgtttcggcaatctgcagagacacagggcctggtttgacggaaagagcgtttaacagtcttcccgccgcttcctgaacggttttcgggtttccttcgaattggtcgatgacatgaagccggcccgttttttccgccggctgtttgtcataagaaaaccagtaatacgcctgcggacgaagggcggtttcaagttttccctgcatcgtccggccgccgatttggataagagcgctttgatcgtccagcaaacggagaaccttccctaacagcagcctttgagcgccgctgtctttaccgccgtcttgccggtccggagggatttccgccgtcagctgtctgaaagccgcttggatttcgccgcttatgttcatgtcttaagcctcttttctaacaataagattgaacgggagcgaacgtttttcggtgaatagttgtcggtccgtatgcctgaagagcttcaagatgttctttcgttccgtagcctttatttttttcaaagccgtacatggggtaggttttggcgtactcagccatgagacggtcccgcgttacttttgctatgcaggctccggcggcaattgacacgcttttggcatccccttttataactgatgactgcggaatgtcaagcggcagggtcatggcatcaacaagcagataatcaggtgtttccgttaaagcattgacggcttttaccatcgccagtctcgcggcctcataaatgttgatccggtcaatgacgtccgcatggacaatgccgactcctacagccgccgcttcttccgtgatccggctgtaatactcctcgagcttcttttccgacaatttcttcgagtccgtgagaccgagaatctcgcattctgccggcaaaatgacggcgccggcgacaaccggtccggcaagcggccctcttccggcttcgtcaacacccgcaatcaggcggaagccctttttggatgacagtctttcgtatgccgtcatgttcagccattgctctttaagagctttttccttcgcgtgctttttcagccattgctctaaaagcgtctgtacgctttttctcgggtctttctcacattgggcaaggaaggggtcgctttcgtccctgacctcttgcaggcgttcttttacgctttttacggttaatgtattcacgttctcttctcccttacattatgtatatcggtattctgcggaaaaaataaagacccgcatcgctgcgcgtctttattctgatggtgtttcaaatgaaagcctgccgaatttttccgtccggatgtcccgaatgatgacttccgttgttttatcatagtcaaccattcctccgcccatcaaacagccgcgtttttcaccgatcgcgtcgaaaagagcggcgatatcctcagggatttcctgaagtccgtagcgctccttcaagcggtcgggataatgctcttccagaaagcgcagcccgaagacggccacatcctgcaggttgataatcgtatctttaatcgccccggtgatcgccaggcgcaagccgacaagctcatcttcaaatttaggccataaaattcccggtgtatcgagcagctctaattccttgcctacctttacccactgctgtgaagtggtaatgccgggcctatctcccgtcttggcaatgttttttttggccagccggttaatgagcgtagacttgccgacattcggaatgccgatgattaatgcgcggattgctctcggcctaatgccctttgctttcattttatcgaacttatctttcagcagctcttttgaggacggcacgatttgatgcagtccctgcccgttaacggagtttattgaaagagagggaatgccctgttcctgaaagtggtccttccactgggcagtcacagccgcatccgccttatcggctttatttaaaagcataatgcgcggcttattttttaaaatctcctcaatcatcggatttctcgatgacatcgggattctcgcatccaccaattcgtatacgatatcaattaatttcagtttttctgttacttcccgtctcgctttagccatatggcctgggaaccattgaatggtcatgtgacttcgacacctgccttatttaccggaaccggatgttccgatgatctcttatgtattttacgttgcttgttctgcttttacaaatttcatataaaaaaagagcctgttacgggtaacaagctcttttcgttcgttatcattatcgtctgatttctttaatacgagccgcttttccgcgaagttcacgcaggtagtaaagcttagcgcgacgtactttaccgtaacgtacaacttcgattttcgcgatttttggtgtgtgtacagggaatgtacgttcaacgccaacaccgtaagaaatcttacgaactgtgaacgtttcgctgattccaccaccacgacgcttgatcacaacaccttcgaagatctggatacgctcacggttaccctcaacaacttttacgtgtacacgtaaagtgtcaccaggacggaacgcaggaagatcagtgcgaagctgttcttttgtgatatcttgaattagtttttgcatcgttttcaactccttccaacagatgctcttggccacaactgcaaggcacagcggaacatcgttttcaagcttctgaaggataagcctccttaagccacaagtagtatcttatcatatcttcatcgcctgcgcaatagaatctattcgttttcccactcggaaatccattttctttgctcatcagtgagaggatagttttcaagaagatcgggacgtcttaaaaaggttcttctgattgattctttatttcgccatttttgtattttagcatggttgcccgacagaagggtctcaggcacttttaagcctctataatctgcaggcctcgtatagtgcggatgctctaaaagccccgtgctgaaggaatcctccacgtgggatgcttcttttccgaggacgcccggcaaaagcctgacaacgctgtcggcgatcatcatggcagggagctctcccccggtcagcacaaaatccccgatggagatttcatcagtgacaagatgttcccggatccgttcatcatacccttcataatgtccgcaaataaacatgagatgttcctcttgtgccagctcctcggctttcttctgcgtataacgctcaccttgcgggcagacgagaataatgcgcggcttggcgtccgtaccggctgtcagcttttcaaccgcatcaaatacgggctgcggctttaacaccatcccggctcccccgccgtacgggtaatcatcaaccgtttggtgtttattatccgaaaaagcccggaaattgatgacgtcaaaacggacagcctctttttcctgtgctttttgcagaatggaggagccgagcaccccttgaaacatttcgggaaacagtgttaaaaagtcgattttcattcgtctattaacccttccattacatgaatcttaattttcttctcatttatattaatatcctttaccacagaagcaatatacggaatgagcgaatcttttttgccttttcttgcaaccacccatacgtcattagcccctggcgtcaagatttccttcactgtgccgatcagttccccgtcttctgacacaacctcgcagccgatgatttcatgaaaataaaattcatcttcttcaagctctcccaagtcttcttcagggactttgatcaccatgtttcttaggtgttcgacttcattgagactcggcatttctttgaattgcagcaggtgaaactgcttgtgaagcctgtgggcgctgaccgttactttgattggctccgcagccccttccgcaaacaaatagagcgtattgccgggcttgtaccgttcttcggcaaagtccgttttagaaatgacccgcacttcgcctttaatgccgtgggtatttacaattttgcctacattaaaccatctgtttgtcatattatcacctcgggcggatttcaattactaccccgtcttttatgacgatggtatttgccgctgttttttcatgccagttatcaccgacgttgattgaaagcagcgcatcgatctccttttccttcacttcgcttccaagcgggagcgactctgtctggcttatttggaaatcgatcattttgattttgtcttgtcttttctcaatggcttttttaaaagattccgctacatcgggattctgctgatctttttcatgttttctaagctgaaaatagagctggctgcattctcgttcaagcgtttgctttttttctgcaaaagaggccaaaagcttttccttgctttgctcggtcagaacctgcataacggttactctgtgaataatctgcataggaccagactccccactcttccaacatatttctgttcatttgccttttttacgtgtaaaaaaaggggaggtgccggccctctccctttttcagtcaaatatttcaaattgaactttcttagaagactgtgcgccagctgcaaaaacgacggttcgaatcgctcttgcagtccggccttgctttccgataatcttaccggtatctgacttattgacagataagcgcagcgcaatcttttgatcagtctcttcctttgtgaccgttatgtcttccggatggtcgacaagcggagccacaatgctgacaatcaaatcttccaagttctgatcagtcattacttgccttgtttagcgttgtggaatttttccataattccttggcttgagaacaagttgcggactgtatcagaaggtttagctcctgtttgaagccatttaagagcaagctcttcgttgattttcacttcagccggctttgcaaccgggttgtatgtgccgactgtttcgatgaaacggccgtcacgcggtgaacgagaatctgctacaacaatacgatagaaaggagatttttttgctcccatacgttttaaacgaatttttactgccattttactagcacctccgaaaatatttcaacaagatagtatattaacaatgataaaagtgtttgtaaagtgttttttcttaacaacggttttatcatgtataaccgattacataaaaggtaatttaaagccttttttcttcccttttgtcatgttggtcatctgcttcatcatttttttcatttcctcaaactgctttaaaagacggttgacttcctgaacggatgttccgcttcctttggcaatccgcttccgccggctggcgttaatgatatccggctgttctttttcaagaacagtcattgatttaatgatcgcttccacatgattcagctgtttttcatcgacttggatgttttttaagcctttcattttgcctgcgccgggcatcatttgcaacagttcgtcaagaggccccatgtttcggacctggccgagctgctccagaaaatcatccaatgtgaagctcatcgttctcattttctgctcaagctctttggctttgtcttcatcaacggtcgcctgagctttttcaatcaaggtcagcacgtcacccattccgagaattcgggatgccatccgttcaggatggaacgcttcaagagcatcgagcttttctcccattccggcgaatttaatcggcgtttcggtgaccgcgcggatagaaagcgccgcacctccgcgggtatccccgtcaagctttgttaaaatgacgcccgttaaaccgagctggtcattaaagcttttggcgacgtttaccgcatcttgaccggtcattgagtcgacgacaaggaaaatttcctcaggatttgcgacttcctttacgccggagagctcatccatcagttcatgatcgatgtgcagccgtccggcggtatctaaaatcacataatcatgatgctcttccttcgctttttcaatcgcctgtctggcaatttccaccgggctgacctgatcgccaagcgaaaagaccggcatatcaagctgtttccccagggtttccagctgtttaatcgcggcggggcggtaaatatccgcagccacgagcagcggtttgcggttatgttttttgcgcagcaggttggcaagcttccccgtggttgtcgttttaccggcaccttggagcccgaccatcataataacggtcggcgggcgtttggcgacggcaattttgctttcttcgccgcccatcagctcggtaagctcttcttttacgactttaataacctgctgaccgggtgtcagactctgcataacgtcctgtccgacagcccgttcacttacttttttcacaaaatcctttacgactttaaagttaacgtcagcctcaagaagcgcaagacgaacttcacgcatcatctcttttacgtcttgttcgctgacttttccttttccgcggatttttgaaatcgtcttttgcagtcggtcggctaatccttcaaatgccattgtttgccgcctcctaatctaatttctcaagcgcttcaatcagagccgtcattttttcctcttcctgcaacccggaagcaagctctttcagctttgtaaacatttctttacgctcctgaaactttttaaaaaggagcagtttttcttcatattgttcaagcatcgcttcagtccgtttgatgttatcgtaaacggcttgccttgaaacgtcatactcttcggctatttcaccaagggagaaatcgtccagataataaagcgacatatagctcttttgttttgacgtcagcaacgactgatagaagtcaaataaatagttcattctcgtcgttttttcgagcgacatttgagctctcccctttgttaagtcaaatccctttacaaaaacttagtttacatggtttcagagcgtgtgtcaagtttttatcttgtcaaagcaggatgctctttttacataataagttttttcaaaaaaattcatatagaccgtcgttaaaatactcgaattcttgttttgatacacgatagcggcaatagccttcgtaaaaagcattgaggcatgcttcatttgtgacaaaatgactgatcgctaatgattcatcatatcgcggatctcccgccgatattcccgcagcatcgataaacagatagacctctccgtctttcaccagcacattatcagtcgtgcagtcaccgtgaatcattgtctgctgaacaggaacaggcctgcacctgtccaattccttcaaaagctctgcacttccttcagcctgtccttttttgacatattccccggctcgtttgatttgtagatcgagccagtctgtttccggctgtaaaccagagaccatttcggtttcatgcagacgttgcagaaactggccgaaacttttgatcagctttttcttttcagtatccccttttgcttttcttaaagccgaagtcagtgtgattccatcctcaaatgacattacgatatggctggcatgctgttcctgtatcatcccataataaataggaacaggcagacgacgagtttccgtcagtttttgtaaaacgaaggcttctctcattaaccattcccgatacttctgttgaaaagaacttttcagcagaaatgcgtcttggccggtcactattttccgaacggttgaagtgcctccctgttcatccagcagcgacatatggtttatcgcgccgatcttactttccaattcagctttcagccatttgtccaacaactgccccctccattccgatctatcaatgcgtataaaaaaacgagtataaaaccgtccattttacactcgttttttattcattaatcctcggctttttcaactaaatcagaaaagagaccgtatacgtaagattctgcatcaaaccgctggagatcgtcaaccttttctccgaggccgaccagtttcacggggatgtgaagctcattgcggatcgccaagacgataccgccttttgcggtgccgtcaagcttcgttaacgcgatacccgtcacattcgtcgctttggagaattctttcgcctgcgccatcgcattctgacctgtcgtcgcgtccagcgcaaggagaacctcatgcggagcctcaggcacttcgcgttcgatgacgcgtttgactttttcaagctctttcattaagtttactttattctgaaggcggccggccgtatcacaaatcagcacatccgctcctcttgctttagccgcgtgtacggcatcataaataaccgcagcagggtcgcttccggcagcctgtttaatgacaggcacgcctgtacgctctccccacacttcaagctgttcaatcgccccggctctgaaggtgtctccggcagcgagcacaacggatttgccttcattcttcagcttatgggcaagttttccgatcgttgtcgtttttccgacgccgtttaccccgacaagcagaataacgttcaggcgcccgtcctgaatatttaattcagaaatctgttcgtcgccgctgttataaatgtcgacaagcttttcagaaatgacggactgcacttcctgaggatcctggatgtttttcagcttcacttcttttttgagctcatcaatcagctccatgacggttgtaaaacctacgtcagcgccaatcagcacttcctcaagctcctcgaagaaatcctcgtcgactttccggtagcgggagacgagttcgttcactttatttgagaaggaatttcttgttttttcaagaccatctttaaatttttcagagacggagtctgtctgtttcgtgattttctcttttaattttttaaaaaagctcatctttcaacctctttcctcgttactgaacgaattcttttgtttcttccagtttgaccgaaaccattcgggaaacgccggattcctgcatcgtaacaccgtagaggacatccgcttcttccatggtgccttttctgtgggtgatgacgataaactggctgtcgccgctgtatttttttaaatattgcgcaaacctgaatacattggcttcatcaagcgcagcttccacttcatcaaggacgcagaagggcacgggccttactttcagaatggagaataaaagggcaatggcagtcagcgcccgttctccccctgacaaaagatttaagttttgcagttttttacccggaggctgcgcgataatgtccaccccggaattaagaagatcattcggatcagtcagcttcagttcagcccgtcctcctccgaataaagaacggaacacgtcgttgaattgagaacggatctggataaacgtttcatggaatcgcttcgtcatttcagaatccatttcttcaatgacttgaaacagtgtatttttcgcttccgtcaggtcatttttctgctctgttaaaaactgataccgttcgtttactctttcaaattcatcgatgctaccgagattgaccgttccgagctcttcaattgaaagcttgatcagtttgacccgttttctcgcctcttcaggctcgagttcgagctgatattgttcttttgctccttcaaaggataagctgtactcctcgcgtaaatactgcaagagattatcaagctcaacttccatccggccgagttttacctcttcatctttcagaatgtctgttttttgcttgtagagacgcttcatctctttcagttcaagctcgttcgtatcaagagcccgctggagcttcacacgctggtcgcgccggctggcgatcaattcgatcgttctcgttttatcgtgaagcttgtgatgggctgcttcttcaagctgctcctcaccgcttgtgctggacgtcatctctgaggtcagaaggcttaaatcttcccgtgtttctttcagagcgagctgtgtttcttcaagctcttttttcagccttttgaggttgtcttcctcactcgagcacgcctgttcttttttcgcagcggccactttacattccgtcagttcatgagagagcgtttcttttgttgaggatagggtctgcttttgttttgtcagcctttccatctcttcctcaagctctttcagctggccggatgcctcactcagctgttcttccagagctgatttgcgcgtctctttttcccggctgctttcggtcagtgatgctttctcctgatcgtaaagctccagatgggtattgatgttcttttcagcaacttcgagttcatacagcctgccttttacatcctgctgctttgttctgaaagcttcaccgtcttcacggagaccgctcagcgtatgttcaagctcttgaatggcctgcttcagcgttttgacctctttttcgagcagagctgttttttcttccatttcggcaagccgcgcagtcaccgtctcaagctcacggcttctgccgagcagagaattgtttttctttttgaccgcgccgcctgtcattgatccgcctggattgacgacatcgccctcaagcgtcacgatgcggtagcggtgcccgagaagcttggccagttcattcgcgccttttaaatcttcagtgatcagcacggtgccgagaaggttttgaatgacattccgatacgcggcatcatatgtgacaagcccgctcgctgtgccgaggaaagacggatgcttctgagccgtctgttcatcacgggtttggagctggcgcggtttcataaccgtaagcggcaggaacgtcgcgcggccgaatgaattctgttttaaatattgaatcgctttccgcgccgcctgctcgtcgtctgtgacaacgtgctgcgccgctgcgccgagtgcaatctcgatcgccgtttcatacttttgttcggtggcaatcagttcgagaacggcgccgcggatgccgccgagcttctctttctgcttcagcacttcttttacgccttggtaaaatcctgaaaaatcgccttgcatcgtttcaagcatatcttttttggatctggcctgctggacgaattgatatgcctgatacagcgctgattctttcttttcatactggcgttttttctgttcatatgctgtctggacttcgcgaaagcggacgacctgattgtgaatatcctcttcaacggcagccaattcttcttcgcacgccgctttgcggactgcaatatcgttacgttcttcaagatatttttcattgtttgctgtcagtctcgcctgctggaccgcggattgggacatctggtcatctaaaagctgcagctcgttgcgaatcgacgcctggctgtttaacaattcaaagtaatcgctttttaattgttcgattttctcatctacattttcattatgcagactgagagcctgctgcttttctttcacttgggcgtttaaccgcttcacttccgcacgcagcttatcatagacggcagactgtttttcaatgtccgctttcagttcggcttctttgttcgtgtaatgtgtaacggattcctcaagctgttcccggttttgcgcggcgttttttttgcgctctttcagcacttctttccggccttccagcttttccagctcttcacttgtcacgagcagaacctgctgcagttcgttgacggattcatcaagcgcgtggattttatctctcgtctcttctatcatcgcttcttttgcggatagagccgatgattccgccaattcttcttctttagcagcctgcaccttgtcttttaaacccgaccatctgccatgcagttgttcgatgtcaaaggcggtaagggcgatttcgacatgctcaagctctttctttttttctaagtagtctttggcgattgatgcctggattttcagcggttcgacctgatcttcaagctcgtgaagaatatcttccaccctgtttaagttatcctgcgtctcaaacagtttgttttccgcttttttctttcttgttttatatttcagcacgccggccgcttcttcaaaaatactgcggcggtcttccgctttgctgctgagaatctcttcgactttcccctggctgataatagagaatgcttcttttccgagcccggagtccataaataagtcaatgatgtctttcaaacggcactgctgattgttgatgagaaattcactctctccggaacggtacacccgtctcgtcacgctgacttcgtgataatcgatcgggagaaaatgatcttcattatcaagcgttaacgtgacttcggcaaggttcagccgcttgcgtgaatcacttcccgcaaaaatgatatcttccatttttccgccccgaagcgagcgggctgattgttcgccgagcacccagcggatagcttcggtaatgttgctctttccgctgccgttcggaccgacaacggccgtgacgccttttacaaagtcaacggatatccgttctgcaaatgatttaaatcctataacgtctaaacgtttgaggaacatcccagatcctccttatcgtataagtatctcaatattatcataatcacccgcttatatcaggcgcagacatactgaaatccccctagggatacagggggattttattgtttcgtatgatgtttttgcaattttgcaagagcttcctgtgccgcatgctgctcggcttcttttttggaacgtccgttcccgataccgagcgcctcacctttaagagagactagcgcctcgaattcccggttgtgggcaggccctttttcattgagaattttgtactcaagcgatccttttccgtcccgctgtacaaattcttgaagctggcttttgaaatccatcacatgagaaaaagcaccatcgtttattttagggaacacgtacactttcaggaattgctgaaccgggtcaaggccctgatccagatacagtgcgccgataaacgcttcaaacacatccgctaaaagcgcaggacgctttctgccgcccgtcatttcttctccttttcccaagagaacaagatcgccgaatgacaattcatgggcaagtgagacgagtgacggctcgcatacgatagcggctctcagcttcgtcaaatctccttcactcatggccgggtatttggcaaataagaattgggagatcgtcagttccaaaacagcgtcacctaaaaattcaagcctttcattgtcttcatacggctttttccgatgctcattcacataagatgaatgtgtaaatgcttgatacaaaagtttctcgttttgaaaatgaaccgaaatccgttcttggaactctttaaattgctctatttttttatagaacttttttttatctttaaaatgtgagtgttttgacatagtaacctccataggcacatcaggttcaccgcgctccccgccgtaaacggaatcggcagcgcgtacagcgtcagacgccggtaaccgaacgattaaagggctaaagccccgctgtcaggcgggacttttagcatcagcttattgctggttttgtatgtagttcacagcgtcgccgactgttgcaatcttttcagcatcttcgtcagaaatctccatatcaaactcgtcttcaagttccataacaagctcaactacatctagggaatcagcacctaagtcttccttgaaagaagcttcaagtttgacgtcagcttcatcaacgccaaggcggtctacgatgattttcgttacacgctctaatgtatctgccatagcaattcacctcccctcaagtattatagaggattcgtttttaaaaaactagagaaactaggatgaaattttaaaaacaaatctttacatcaccattccgccgtcaatatgaagggtttggcccgtcatataacgcgatccttcagaagcaaggaacgtaacaacgctgctgatatcggaaggatcaccgaaacgcgcgagcggaatctgcttcagcatttcatcttggacttctttagaaagcttgtccgtcatatctgtagaaataaagcccggagcaatggcattaaccgtaatattgcggctcgcaagctctttggctgatgacttcgttaagccgattacaccggcttttgccgccacatagttcgcctggccggggtttccgctgacgccgacgattgatgatacgttgataatccggccggagcgctgtttcatcatctgtcttgtcacggctttcgtgcagttgaatacacctttcaggttaatgttaatgacatcatcccattcattttctttcattctcatcagaagattgtcttttgtgatccccgcattgttcacgagaatgtcgattgaagaaaatgcagcgacagcctctttcatcatgttttgtacttcttcggaatttgatacatcggcttttaccgcgatcgcgtttcggcccaaagatttgatttcatctacgacttcgttcgctttcgcttcattcccggagtagttgactactacgttacagccgtttttcgcaagatcaagcgcgatcgcccgcccgattccgcgggacgctcccgttaccactgctgttttttcattaagcatcctgattctcctccttcagcgtttgaatcgccagttcgatggtttcatggtcagaaaccgcgattgttttaaggcggcggttcacttttttcacaaggcctgaaagcacttttcccggcccgatttcaacaaacgtcgtgacgccttcgtcaatcagtttgttaatggtttcttcaaagcgaacaggtgaatacagctgttcgatcagttttttcttgatatcgtctttttctgtcataacgtcagccgaaacgtttgaaatcacgggaacagccgcattttttaactcacaggcgctgagcacctcctcgagtttttgcgctgccggcttcattaattcagaatggaacggtccgcttacttctaatgggattgcccgttttgctccgttgtttttcgcttcttctgaagccagctccacgccttttgccgttccggaaattacgatctggccggggcagttcaagtttgcaagctgtacgagatgaccgttttccgtcacttgatccgtcacctttttcaaggactccgcatccattccgagaatagcggccatggcgccttctccggccggcacggcttcattcatgaattctccccgttttcttaccgtgtaaacggcatctttaaatgtcatcgctcccgccgcaacaagcgccgaatattctccgaggctgtggccggcggtgaaatcaggggtgatgccggattctttaaacttttccaatacggcgatgctcgttgtcaacagcgcaggctgcgcattgtatgtaagggtcaattcttcggcgtcaccttcaaaaatgagcgagctcagctttgtttcaagcgtttcgtccgcttcatcaaaaatacgttttgacgcttcttcgcgttcgtacaggtcttttcccataccgatatattgtgatccctgtccgggaaataaaaatgcaatcttactcatgatgcggtaacctccagactactcatctgttttttcttcttttacttcttcttctataaatgcggccacgttttggctgaccatttctctcgcctggcgcagcgcatggtaaacagcgcgtgcgtcagaagagccgtgcgctttaacgacgggcgctttcaaaccgaaaagactcgccccgccgtactcagaatagtccattttcagtttcatttccatcagcttcggcttcagcactcccgctgcgagcttagaaacaaaacttgaagtcagtgtatctttcagcattttgaaaatcgataacgctgaaccttccaatgttttcaacgtgacgttgcccgtaaagccgtctgtgacgatgacgtcagcagcgccttcgagcaagtctctcgcctcaacgtttccgacaaaattcacgtttgtttcttttaataattcaaacgtcttttttgtcaggtcgtttcctttcttttcttccgtgccgacatttaacaatccgacgcggggcgagctgattccgagaacctgccgggcatatacagatcccataattccgtactggacgagatgctccggtttggcatcgacattggctcccacgtccaaaagaaggaaaccgtcgcctgaaacggtcggaagcgtcggcgcaagcgcaggccggtcgattcctttaattctgccgacgataaacagtcccgctgtcatgagtgcgcccgtattccccgctgagatgcaggcgtccgctctgctttcagccacttcctgcgccatcagcaccatagaagagtttttctttctgcgtacggcgcggaccggttcatccgtcggttcaatcacttcatcggcgtgcaacacagtgatgcggtctgatgttgttggcaagtgtgattctatcgttgtcttgtcaccgaccagcgtaatatgaagatcgtcaaatgcctcaatactcttcattactccgtcaataacagctttgggtgcgttgtcgccccccattgcatctacagctattctcatgcatgctccacctttatgattgttttgaacgatacatgtcaaagctgccggagaacacgacttcttctcccacatagctgttgacttcaactaccgttctgcctttttctttttcgactgccgtcactttggctttcgcaacgacgcgctcgccttctttcacctgtcttgtaaagcggatatttgcgcttgcggtcagcgccagctcatcatcaatgacggctacggcgagtgagttcgcctgcgcaaacaaatgatgcccccgcgcaatttgattgcggctgaagacatgttcgcgtcttacttctaatatggaaatggcctggccgtcaagctccagatcaataatttcaccgatcacttcgtctaaagacagtgatttcacttcatcatcaagcgtttgttctgccacgtttttaattctttccctcagctccggtattgagagctctaagcggtctaaacggatcgtctgaatgctgacgccgaatttccccgctaattcttcatctgtgatgaagggtgtcgatttgatcgtctgctgcaataatttttggcgttctttcttgcttcttctcatctgtaaacaccatccggacaattaagactaggtactaatagtagtatataatctcatagattggaatgcaatgattgttttttgaaagccgccgaattttgcagaatcagcttaatttctccccttccaggacgccgcttgaaagtaattgaccgcgcagcatgcggtattcgtcatctttccaaaaagcctctgaagacaccagattggccgcatcctggcgggccgtctccaaagctctgtagtcatgaaccatatccgccaccttgaactcgggcataccgctctgtttttttccgaagaaatcaccggggccacgcagttcaaggtccttttcagacagctcgaagccgtcgtttgtctctgacatgattctcatccgttccttcccggtttcggatttcggatctgccatcaagatgcagaaagattggtggtctccccgcccgacccggccgcggagctgatggagctgagataacccgaaacggtcggcgtcatagatgaccataatcgtcgcattcggcacgttcaccccgacttctacgacggttgttgacacaagtacctgacattgattggcgctgaattctctcatcacctgatctttttcatcagaatggagcttcccgtgcatcaggccgacattccatttaccgcggtaaacgtcagacagcatgttatatacgtcaatcgcattctgtacatccagtttatccgactcttcaatgagcgggcagataacataggcttgccttccctgcttcagctctttttctataaaagccaaaatccgctccagcatgtcgtgtttcacccaatacgtttcgatttgttttcgccccgcgggcatttcatctatcacggaaacatccatttctccgaagacggtaatggccagcgttctcggaatcggagtagctgtcataaacagcacatccggatcctgacctttattcttgagttttttgcgctgttcgaccccgaaccggtgctgctcgtccgtaataacaaggctcagcgctttgaattccacttcatcctggattaaagcatgggtccctactaaaatatcaatctctccgagagcaagccgctccaaaagctccctgcgccgctttcctttgacagaactcgtcaaaagcgcgatatttacatcttcatttgcaaacaacgatacgagagaatctgcatgctgttcggccagaatttcagtcggcaccattaatgccccctgataccccgacaaaatcgcagcgtacaaagcgatggcggcgacggccgttttccctgatccgacatcaccttgcagcagacggttcattcggtaaggggatgtcatatcagcggtaatttcccgaagcacacgcgtctgtgcggtcgtgagcgaaaacggcaggctgtctgtgaaagcggcgagcttttcagcaggaaacacatggctgatgccttttgactgttccctttccgctttacggaacgcctgcattttcagctgaaataataagaattcctcgtaaacaaaccggcgtcttgcctgctgtaacgattcccgcgtttcaggctgatgcatcgtctgcagggcatgtttgtagtcaggaagcttgtagcggattctcaatttttcaggaagcggatcagccgcactgtccaaatgatgctgcagcgcttccttaataaaccgtctcatcatttttacggtgacgttttctttaacggaataaacaggctcaatgcttttatcttcttgatgaggaccgttttttaattcctgcacggaaacggtctgtctgtgtttatcccatttcccggatatcgtgacgacagaacctaacgtcagtttcttttttaagtagggacggttaaagcagaccgcggtaattaaataattgccgacaagcactctgaatgtcagcctgtttcgttttttgccgtaataggtaagagaaggttctgaatgaaccttcccttctaccgtcactctttcttcatgttttacttcttctaaatccctcagctcatagtcatcataacggtaagggaaataattcagaagatcagaaatgtcatagataccaagttcgtgcaatgttttttctgtttccggcccaatgcccttaatttccgctatactagtttgctgatggtgtgccacttgatttcagcgctcctccgaaaatttttttctctaattctcttcccgtcggtgtcgcggctaaaccgccttgtcccgtttcacgcagtgctgtcggcattgtctggccgattttgtacatcgcgtcaatcacctcatcgcaaggaatgcggcttgtaatcccggccagcgccatatccgccgcgatcattgcgttggatgctcccattgcgtttcgtttgacacacggcacttctaccaatccggcgaccgggtcacatacgagaccgagcatatttttcagtgtaatcgccattgcttccgctgattgctgaggcgttccgcccgccatttccacaatcgcagccgctgccatgcctgatgctgacccgacttccgcctgacagcctcctgccgctcctgaaatactcgcattatttgctacgacaaaaccgaacgcgccggctgtaaacagaaaacggatcatttgttctgtcgtagggttcagcttatgctttacggcgaataacgttcccggcacgaccccggcagagccggcggtcggtgtagcgcagatcgttcccatcgccgcattgacttcatttgtcgccacagctttagaaacggcgtctaaaatcagattgcccgacagacttcttcccgattggatgtatgcctgaagtttcacggcatctccgcctgttaaaccggtctgactcgtgacgcccttcagccctttttcaacagctgcttccatgacggagagattgcgctccattccttgaaagatttcttcccgcgttttttgcgtcacttccatctcttgggtgatcatcacttccgaaatcggaatttgtttttcttgagtgatttctattaattcttttacattacgaaacatgtcattttcctcctgactttttagtcagctatcttagtaacctgtataatattaggaagtgttgaaagctcgtcaagcacttcttcttcaatattctgatcgacctcaatcgtcatcagcgcaagctggccgacgtccttacgcgccacttccatatgtccgacgttgatggagaatttcgcaagcacattggcaacgcctgcaatcgtgccgaatttatcattgtgaacgactaaaatagccggatggtttccggacaaacgcagctcaaagccgttgagctccgtgatttctatttttccgccgccgatggaaataccggtaagggcaagctctccctcatcatcagaaatgacgatgcgcgctgtattcggatgaacgggcacggcatcctctgtacggaactctacatatatgcccttctcttccgcaatttgaatcgctgttttaatccgctcatcaaatgtatcaaaatcaagcaggccgccgataatcgcgacatcagtgccgtgacccttatacgtctccgcaaatgatccgtaaaaagacacaacgattcggcggggctcccgcctgaataagcttctggccactctgccgatccgggcggcgcctgcggtatgtgaactggacggaccgatcattaccgggccgataatatcaaaaacgcttctatacttcatgctggtttgttcctccttaacatcactttattcagcgcttttctttagactaattgaacatttctcaattggcaagcaggcacactgccgcactgccgcaggtaaataaaggcataagaatagaagggcctgataagcccttctattctgccgcaaatatatatggatacagaggctgtctgccgttatggatttcaacctcgatatcttcacagacgcttgcaatatactcagcgagtttctcagcttcttcttccggcgcgtcctctccgtacaggatggtgatgatttcatcttcatccccgatcatttcatccagcagcaatttcgccgcacttatccgatcttcggcgctgccgataattgaactgtttaaaatgccgataaaatcaccttttttaatatctttgccgtcgatatgggtgtctctgactgaatatgtcacctgtccgcttttcacattccggatggcctcaagcatattggcttcatttacgtcagccggctggtcagggttaaacgcaagcagggcggtcatgccttgagggaccgtttttgccggaatgacaatgacattttcttcagccacgctcgccgcctgattggcagccatcacaatattggaattgttcggaagaatgaaaaccgtctccgcattgacagactgaacggcttcaacaatatcttccgtgctcggattcattgtctggccgccttcgattacgtgtgaagcgccgatgctcgtaaacaattcagaaatgccctctcccattgccacagtcacgatgccaaaaggcttgcgggcttctttcataacgccggccggctttttttcatcatgttcttggctgatgattgaagtatgctgttccctcatgttttcaattttaattttaatcaaatcgccgtaacgctgtgcgagattgagtacgttccctggttcttcggcatgaatatgaactttcgccagcgtgtcatcagccacgaccagcaatgaatcgccgaaacggctcagttcgtttctgaacgtctcttccttgaacgtccgtttatcttgatccagccttaccatcacttccgtacaaaatccgaattcaatgtcttctgtactcagcatgctctgcgcgcttttatgatgctcggcattcaccatatcatcgagtgccggaagaaccgcttttttcggtacggcctctccttttaaagcagccaaaaagccttcatatacacaaagcagaccttttccgccgctgtcaacgacaccgacgtcctttaaaacaggaagcagatccggcgtgcggttcagcgacgcttccgcttcttcaataacggcctccatgaccgaaataatatcggtttcttctttggccgaggcgaccgcttttttagccgcatccttggccacggttaaaatcgttccttcaaccggtttcatgaccgccttatatgccatatccactcccgcttggagtgctgcggcaaattcttgggcgtctatttggtttttgttttcaatgctctttgtgaaacctctgaacaattgggacaagatcacccctgagtttcctctcgctcccataagcaggccttttgacaaggcgatgccgactttgccgatgtcgggtgagtcaatgtgctctacctctcttgcaccggatgacatcgataaattcatatttgttccggtgtcgccgtcaggcacgggaaacacgttcagcgcatccaccgcggatgcgttttgagacaatgtctcagcccccgccagaatcattgccgcaaaagctctcccatctaagtttcgtctagacaatactcatcctcctcactacgggttcgttactcgtacgccttggacataaatatttacagaatcaactgcaagtccgattgtttgatttactgtgtattttaccttcgtctgaacattgtgggctacttcggatattttagtgccgtagctgacaataatgtacatgtcgatatgtatttgttcggcttcctgacggacatgtacgccttttgcgaagttctctctccggaggatttcagacaaaccgtctttaatctggttttttgaggccatccccactattccgtaacagtcaatggcagcgcctccggcaaccattgcgatgacttcgttggatatatcaatctgtccgtattttgtcttcatttcaatggacacacaggttcctccttcagatgcatagagttatcattattctactatatgtatcccattatgaaaagaaaagatacagacagcggccttcagcgcggaaatgtgattggttttacatgtcaagtgatttttcttgaaagtaagggaaacaatagttgcaaacggtttttagctgtggtaaattatttaaagtattgtataacgaaagcatctgagacactatgtttgaaaagatgtttcgcgcagttaggagggaaacaaatggcacgtaaatgttttattacaggtaaaaaaacaaaagccggaaacaaccgttctcacgcaatgaacgcttctaagcgtacttggggcgccaaccttcaaaaggtccgcatcctcgttgacggcaaacctaaaaaagtatatgtatctgcccgggctttaaaatccggtaaagttgagcgtgtataagcaaaaatgaacgcctgcccttttatgcggcaggcgttttttatgcgttcaaagagggcaatttcagcttcttgggcttactcttttctaaatgagcccagcatcgcccggacaattcctcctaaaaacttcggcaatttaatggtataaaatttcattttgtcccctcctataagtcccgtatccgctgcgttcatcactttaggattcatggttttttccgcatatggcagaagccgcttttctaatccgcgctccttaccattattaatatgccttttgcaaacgaaaaagtacctcgtgaatgaatgagttcgttactaatacatagtgtggaacccagaggaatatgacaattatcaaggggatatttaaaaccgtcgagtgtcaggccgtctgccgcttccgtaaacggaatgaaagaaatatagcgtctgcgcactttttcttcaattgtataacggccgggcccgaacatctgaatgtcattctgccggtcgatcagctcgacatcggtattcttatgtaaggctttatacagcagctggatattccctaaaaagtgatcggctcttccgcccgtcacaccgaatatccgaatgttttccggttctttttgtaaagcccagtcaagggcgagttcaagatcggtataatctttttccgcctgatacacatggagggccggcgctgctttttgaatctgcatgagctcctcttccgtaatgctgtcaaaatcaccgaaagcttcctgcggaatgattccggcctccaaaagagcaaccgtccctttatcgactccgacccacgtcgtatctccgtctgtgtattcggatagatcgggaataagctcccgcgggcctcccgcaacgatattgattgtattcatatgttatcctctctcttagacgcgaaaagagccggcggctttcaccgggctctttttcagcatgtttatgatgcgtttcggatgtcagcgatggcttttttccgatccggctgattatatacggcagacccggcaacaagcagattggcgcccgcttcagcgcataaaggggctgtttctttattaacgcctccgtccacctcgattaaaagctcagacaggcctttctcctcagccagctgtttgacctgacggattttcggcagaaccgaatgaatgaagcgctgtccgccaaaaccggggttaaccgtcattaacagcacaaggtcaagctcctcgatcacatgttcaatcgtttggacgggcgtatgcggattgagcacaactcccgcttttactccctgctcttttatcaattgaatggtccggtgaagatgcggacacgcttcagcatgaacggaaaggatgtccgcaccggcttttgcgaatgccgggatgtagcggtccgggttttcaatcataagatggacatccagcggcagatcagtcaccggacggacggcttcaacgataagcggcccgattgtaatgttagggacgaaatggccatccatgacatcaatatggatatagtccgcccctcctttttccacgtctttaatttcctcgcccagtgaagcaaaatcggcggaaagaattgatggcgcaaccttaatcatattaatacctcggctttctctcttttatttcctgcataaattctttgtaatgctcatagcggtacggctgaatctctccttcttccaccgcttgctttaccgcgcatttcggctctttaagatgcagacagcctctgaatttgcaagaggcgcttatttctctgatctcagggaacgtgctgcccagctcttcttcctcaatgccggtaaattcaagcgaactgaaccccggagtatccgcaaccagaccgcctgatgtatgaatgagctccacatggcgcgtcgtatgttttccgcgtcccaaatgcgcggaaatctcgtttgttttcagctcaagctccgggctgatcgcatttaaaagcgaagattttccgactccggactgaccggcaaacaccgtcgttttgttctcgaagtgtttcacaatgcctgttaagccgctgttttcttttgatgacgtcacatatacgtcataaccgatcgcctgatagtctttcacgtaagaaagtatcgcctctttcgattccccgtctgcagctaagtccattttggttatgcagatgatcgggtgaatgccgttggcttccacaaggacgagaaaacggtccaataaagacgtgctgaacgccggctgaacggcagaaaagacaagaacggcctgatcgacatttgaaatcggcggcctgatcagctcgtttgttcgttctttgatttccagcaggtagccttctttatcattttcagcctgataaacggcataatcgccgaccaggggcgttattttattttttctgaaaatgccccggcccctgcattgaatgatcttgtcctgtgattcatccaagacataatagaatccgcttaacgcttttataattttgccctcaggcatagggtccctccttgtcagtcattatctttcgggtattcaatcgttttgtagctgacgactttatgatcgaccatcacttgataataccccttctgtccctgatcaatcttcagttcaattgttttttcagtcggctcttttattttaaatgagtcatacgtatcagagatgctgtggtccttatcatcgatggcgatttgcacttcaagctcgtccccttcatgttcgggttcgtaaggaatgctgattttttcttttaccgttttcgccggtttttcttcaggtccgagcgagaacgtcacttcaacattacttcccggcttaaccgcagtgccggctgccggctcttgcttcatgacttgtccttccggcacgtcatctgaatgggcttgtttttcaacaagctgcaggccgttatcttcaagataccctgaagccgcttctttgctgtaagtctttaagtccctcagcgtaacgtccgccgggccgaggctgaccgttagattgacttcatcgtcgcttgcaaccatgtcggtgccggctgacgggttctgatcaattacggtgccggcctcgctgtcatcgttctcttctttgacattgacatgtttgaagcctttttccttcagcgctttttttgcgtcgccgatctgccgccctttcacgtcgatcagctgggttttcggttttccgatgcttttgtacagttttacagaagagctttctttaacggtagaccccgcttttgggtccgttttgaccattaattcctcttctattttttcatcttcaatatccgttatatcaggatccgcccggagcccgttcttttcaagcagggcttccgctttttcgtacttcatgccccgtacatcggggacgcttacatctttaggcataaataaagacggaaacacggtgaccgcaagaacagctgccataatgaaaatgaaacagacggccagcaaaacccacggccatttccgttttttctttttggcgggctgctgttccttatcatccgtctcccccggcgtctccgcctgaggcgcggcttttgtgccgtcagtaataacgggaatggcttttgtcatttcctcatcatcctgcacggaaaatttttgttcattcagcctgccggcgtcaaaagccgttctgatgtccgcttccatgtcctcggcgctttcatagcggtgaaacgggtctttagcggttgcctttaaaataatgttttcgacgctctgcggaatggaagggttccactttctggcggaaggcgtttctgtttgcagatgctttagcgctatactgacggctgattctccgtcaaaaggaattttacctgttaaaagctcaaacagcacgatgccgagcgcgtaaatatctgattttttcgttgccagaccgcctctcgcctgctccggagacaaataatgaaccgagcccagcacagaattcgtatgtgtgattgtcgtagacgtaagcgctgtggcgatgccgaaatccgtcaccttgatatgccctaaatgatctatcaatatattgtgcggtttaatatcccggtgcacgatatggttttgatgggcatgggcgatggccgagacgatctgctccataacggacagcgcttctttcggatgaagcggtccgtgtgcttttatgtattcctttaatgtcatgccttccacatattccatgacaatgtaataaatatcgccttcctccccgatatcgtaaatactgacgatattcggatgatcgaggcttgatgccgactgtgcttctcttctgaaacgcctgataaaatcaatgtcattcacaaagtcaaaccgcagaattttaattgcgacttcacgttcgagaatgatgtcctcagctaaaaaaacgtttgccattccgccgccgccaatgggccgaaggatatgataacgcccgctgatccgcttgccggttagcacttgtcttcaccctcttttgcatctgcggaaaactcaatcaacacagccgtgatgttatcttcgccgccgttttgattcgctttgctgatgagaaggtctactttttcctgaggatcagattcggcttgaagcatttgtttgatctcgtgatcttctattttatttgacagtccgtcagagcataaaagcagctgatcgccgtcagacagttcaaaagaacgggcgtcgggactgatggtttcatctgtccccagcgctctcgtcaatacatttttccgcggatggtgctcggcgtcctctttcgaaatttcccccgtcttgaccagctcattcacaagcgaatggtcttcagtcagctgagtgaattccccctcttgaagcaggtagcaccggctgtcaccgatatgagccacagtgacaaacttcccggtgaataaggcgcaaacaacagtggtgcccattccccggcattcttcattcgctttagcgtggtcatgtactttgacattcgcctcatgaatccggtctttcagccaatcctcgcaagcagacggcagagaaggaaccgtttcggtccggttccactgctcttccatcgccgcaaccgccatcctgctcgctacatctccggcaagatgaccgcccatgccgtcggcgacaaccgcaagcaccgcgtcttcttttgtgaaaatgcccgccgcatcttcattatgccggcggactttacctgtatctgttttcaaggctgtaatcaacctcttcacctcgtctcgtcttgacgctccttcgcgcgaagctgaccgcaggccgcgtcaatgtcatggccttgctctcttctgatcgtgacatttacaccgcgggattttaacgttttttcgaatgcgaaaatctgatctctcggtgtgcggacgtaatcccgttcaggcacatagtttaccggaattaaattgacatggcatttcacgtcttttaacagttctgcaagctcttctgcatgttcgacctgatcatttacgccaccgaacagcccgtattcaaagctgatccgtctgcctgttttctcgatgtaatatttgacggcctccataaggtcaggaagcttataggctttgttaatcggcatcagacggcttctgatttccgtattcggagcatgcagagaaatcgcgaaattgatctgcattttttgatcggcgaaatcgtaaatcttcggaatgattccgctggtggaaactgtgatatgacgcgctccgatgttcagccctttatcgtggttaatgatttttaagaaagcgagcatttcattgaaattatcaaacggctctccgattcccatgatgacgactgagctgacgcgttcatccgtttcatcaagcgccttttgcactttcacgacttgagcgacgatttctcccgcttcaagattccgtttcagtccgccgagcgttgacgcgcaaaatgtgcagccgatccggcagccgacctgtgtcgttacacatacagaattaccatactcgtgtctcattaaaaccgtttcgatcgtataaccgtcatgaagctcaaataaaaatttcatcgtgccgtcttgagatgtctgttttacagccgttttcagcgttgtcagcacaaaattgctctcgagtttttcacgcaggctttttgagaggtttgtcatttcatcaaatgaagaaacccgcttctcataaagccattcaaaaatctgtgctgcgcggaacggcttttcgccattctcggtcagccattgtttgatttcatctaattcaaaagagtaaatggacggctgctcagtccgcagctctttccgtacgcttgtcttttttaattgtgtcattttttatcccttctttctcatgctgctaataaagaaaccgtctgttccgaaataatgcggaagaatttgaaggcttccatcctgaacaaagggtctcgccttttcaggcagccgcttttcaagagacaaatcgggttcaaactcagggtgttcttgtataaacgcatgcataacttcttcattttctgtccggtccattgtacacgtactgtatacgagtgtgccacctttttttactaatggggcgatttcccttaaaatgccgagctggatttctgacagccgtctgctgtcctccggcgtcttcgtatatttcatatcgggttttcttctgatgacgccgaaacctgagcaaggggcatcaacgagaacacggtcaaaccgttctgcgccaaaggcctctcccgcttttcgcgcatccatcgtttgcgcgtcgatgatcgtaagcccgagccgttctgcgccctctttaatcagcttcactttatggcggtgaagatcaagcgatgtgaggctcccctcgttctccatcagttccgcaatgtgagccgactttccgcccggtgcggcgcatgcgtctaaaacggtttcgcccggcttcgggtccagcgcccgcgcgacaagcattgagctttcatcctgtatggatacccggccgttttggaaaaatgccgtgttcgcgatgcttccttttaaaagcttaatcgcatcaggagaaaggtctccggcttcagcttcaagaccggcattctccatctcattcagcaccgtttccctgtcgctctttatgtgattgacacggagcgtctgcttcggcggaatgagatgaatccggcagatctgttcagctgcctcaaagccgtacgcctcgacccactcttttacgagccactcgggatggcttgtctctgtggaaagacggagaaccgggtcttcaatttcagcgaatgacggcgccccttcacgctgcagggagcggaggatgccgttgacaaaggacgcaatgcccttatgcccgcgttttttggcgatctcaaccgcttcatgaatggcggcgcgatccggtattttttctaaatactccatttgatacgcggacagacgaagcagctgaatcacccatggcttcactttattcggcttgcggataaaaggcttcagcatgtagtctaaggcgattttattttgcagcgttccgtagacaagctctgtcagcagtcctctgtcctgatcgctgagcgtgttcgttttgataaccgatgtaagaagcaggttgctgtatgcctgattttgctcaagcttctcaagcgcttcaagggcgagctcccggacattaattttcttcatttgcttctcctaatacgtcaccgggctgcacatttttgcctcttacaaaatcttcgcccttcatccgtttttttcccgccggctgcagctctgtgattaaaagggcggtgctgtttcctgatgcggcgacaatgccgttttgctccgtgcggatgactgttccgggcgcagcttcagtttttgccgcaactttttcagaagcccatactttcatattttgaccgttcaaagttgtataggcgacaggccaagggtttaaacctctgatctggttgtagatctcttctccgggctttgcccaatcaatccgctcctgctcacgcttaatgttaggcgcgtaagtcgcttttgattcgtcctgtttgatcggtttaatatttccggaaatgacgttcgggacggtctctgacaaaagcttcgcccccgctatgcttaatttgtcgtgaagcgtgccgacgttatccgtttcatcaatttccacttcgattttcgaaatcatatcgcccgcatcaagcttttcaaccatatacatgattgtcacgcccgttttcttcttgccttggagaatcgaataatgtatcggcgctccgcctcttaattcaggcaatagtgacgcgtgtacgttgatacagccgtatttcgggccgtccagcagctgcttgggcaggatctgtccgaatgccgccgtaacaatcaggtccggcttcaggctgagcactttttctatttcttcttcgagccttactttttcgggctgaagcacgggaatgccgtgacgttcagcttcagcctttacaggagggggcgtcatgattttttttctgcctttcgggcggtcaggctgcgtaacgacaccaaccacttcatacccgtcttcaataagcgtgcgcaggacgggaactgaaaaatcgggcgttcccataaaaacgatccttgtcatccaatcatccttccatttctgccagttcttcttcagtatagtaagccgtaatttttgatgtgaataaaatgccgtctaaatgatccatttcatgctgaacggctctggccaaaaaaccctccgcttctaaaataaacggttttcctttacggttataggcttttacctttacgtaatccgggcgggtgacatcgccgtaaaccccgggaaagcttaagcagccctcgactccggtctgttcaccgctcttttcaagaataaccggatttacaaggtcgatccggccgctttcttcaccgatgtccacgacggccgctctttttaaaatgccgatttgcggcgcggcgaggccgacgccatccatttcgagcatcgtatcgtacatatcgtcaagcagtttttttaattttttatcaaacactgtcacttcatcggctggtgtttccagaacctccgccggatgtgtgacgatttttttcacagccaaaattttgccctccaaaaactaatgttacatcagcatgtacggattcatatcgattgaaatcatgacatgcttttgcgcaatgtcgcgtttatagtgctccagtatctttttcaactgaatctgcaactcgttttcctgtctgtattttatcacgcattgatagcgatatctatctttgatcctggcgatcggggaagccgccggcccgagaattttcgtatcaggcccgcatcccgctcttaaatagtttgtaatcttttctgcggtgaccgcggcttttgccgcttcttcatgagaaacggtcaccagcgccacgtaataataaggcgggtatgactgggcccgtctgtgcgccatttcctgctgaaaaaaagtttcatagtcatgcgttttcgtcagctgaatgctgtaatgagacggtgtatacgtttgaatgaccaccgttcccggcttttcatgccgcccggcccgtccgcttacctgcgtcagcagctggaatgtcttctccgcggccctgaaatcagggatgtgaagcgtcgtatctgcgcttaatactccgacgagcgtcacgttcggaaaatcaagcccttttgcgatcatttgcgtgccgagcaggatatccgccttcccttcaccgaacgctgacaacagtttttcatgggcgccttttcttgaagtggtgtccacatccatcctgatcacgcgcgcctgaggcagcactttggtaagctcctcctccacacgctgcgtgcccgtgccgaaaaagcggatatgttcgctgccgcattccgggcatgttcccgggacaggttcctcatggccgcagtaatggcatttcagcctttgtccgtagcggtgataagtcattgaaatgtcgcaatgcggacattgcggcacataaccgcagtcccggcacatcacaaacgaggaatacccccgtttattcagaaaaaggacggcctgctctttttttgcaagcttctcttccagctgttccatcagctctcttgaaaacattgatctgttgccgtttctcagttcttctctcatatcaacgagagaaacgtcaggcatgagctggcgatttacgcgatgttttaatggaagcagctcataaacgccttttttcgcccgcgcaaatgactccaatgtcggcgtggcgctcccgaggacgaccggacagctgtgatgctcggcccggcggatggctacgtcctttgcatgataccgcggcatttcctcctgcttataggaagattcgtgctcttcatcaataatgatcatgccgagattttcaaacggggcaaagatggccgatctggctccgacgacaagccggacttccttgcgctgaatcttccgccattcatcgtatttttcacctgtggataatccgctgtgcatgaccgcaacctgtgagccgaagcggcctttaaaacggttgaccatttgcggtgtcaacgagatttccggaacgagcacgatggcttcttgtccttttgccagcactttttcaatggattgcaggtaaatttccgttttgccgcttcccgtgacgccgtgaagcagaaagacgtgatggacatgatcggctacagcttgtttaatcggctcaaaagcggcctgctgctcttctgtaagagagagcggctctgtttttttgaacattctgtcctgataaggatcgcggtaaacctcctcaaagctttccgtaagaagcccctttttaagaagcgttttcagcgtcgcggaactggaatcggtctttttgcaaagctcggccgcggaaatctttgctcccccgccgataaaataagtaagcacggcgagctgtttagaagcctgctttgtcaatgaatctgcgtgccgggcgagttcttctttgtccgcccccgcttcgatcatgcggatcatttttttattcgttttttgggcgactttatatgtgacatcaatgcttcctttgcgcacgaatttttgaagtgacgaaagaatgctttcatcggtaatatccgagtacagaagacttttttgattcctgaaaagctgtttgatgtccggtgtcagcgcttcttcgtcaacgactttcagctctttctcgtacttcgccttcagtgcggcgggcagcattgcctgaagcgccgtgattttaaacgacagcgttttgtcagaaagccatgaagacagctgcatcagttcctcagtcagaacgggcgtcaaatcaagaagcttctcgacttccttcattgagccgccgtttaattcagacgaatctttcaaaccggtcacaaatccttgaagcttgcgcgggccaaacgggacaatcacccgcatgccgacttcgatcatcccttttaaatgatcgggaattttgtaatcaaagggtctgtcaatgtttttggagctgacatcgacaatgacttctgctacattcatacgggttttcggtcctcggctttcaaagcggtcatttccttcagcatttcaaaggaaacgtcaagtttagacataagcgcaagctcccgttttcttccgtcccggaaatagaaggtgacgacattcgtatccgtgccaaatccggccccttctgctttcacatcatttgcaacgatcatatcaaggtttttctgttcaagttttctgcgcgcatagcgttcgacgtcttgcgtttcagccgcaaatccgaccagcagctggtgtgttttccgttcgccgagttctttcagtatgtctgccgtacggttgaattcgatcacgagcgaaccgtctttcttcttcattttgtgatcagaaacagccgccggcgtaaaatcggccacggccgccgtcttaatcaccatgtcgcatgaatcaaacacagaaaacacggcttctctcatatcagctgccgattgcacaggaagaaactgatacagcccgactggcggctctattgacaccgggcctgaaatcagcgtgacccgcgccccgagacagacggcggcttcagcagcggcgtagcccattttgccggtggatttatttgtgaagaagcggacagggtccacggcttcgcgcgtcggaccggccgtaatgacaatatgttttcctttcagcggcgcatcgtcttcaggctccttaaaatgctctctgacacgctcaacaataagctccggctcctccagccttcctttgccgacatatccgcatgccaaatagccttcactcggctcgataaagcggaccccgtcctgataaagcacagagatgttccgtttcaccgccggatgatcatacatatggacattcatcgcaggcgccacccaaaccggggcctcagccgccagcaccgtcgttgtgagcatatcgtcagcaattccgttggcaagcttgccgatgatatttgccgtagcgggcgcgacaataattaaatccgcccagtcagcggcatcaatatgagatatcaccttcggattttgttcattaaatgtatctgtatatacttcattccggctcagcgcctgaaatgtcagcggagaaacaaactcacgcgcggactcagtcataatcactttgacgtttgcgccggcctgaaccagcttgctcgtgagtgcggaagctttataaacggcaattcctccgcttacgcatagcaaaatgtttcggtttttcatgaagtcttctcccctttatgaaagcattggacaaatcccaaacggaaaaaaataacaacctatgtagagataggttgctacgtgtgcttgttattcgctgtcttctctttcaaacgaaagcaggcccgcgtctatttcttctaaagctttgcctacatatttgtgagaaatggtatgttcaatctgctggtcttttttgatctgcatttcacgcgcgcgtcttgcagacacggtcaccagcgtatatttagaatctaatttattcattaaagagtcaattgacggatctaacataagttattctacctccagcattttcttatatctcggagcgacgcgttcacgttttaagtgctcggcgagaacgattgcgttaatcttatcacaagccgtttggatatcgtcgttttcaacgacataatcatacgcgtccatcatttcgatttcagcttttgcggcattcattctgttttcgattaaatcgtcggtttcagtccctcttgtcacgattctgtttttcagctcagaaagactcggcggcgctaagaagataaacaggccttccggaaatgcattccgcacttggagcgcgccctgcacttcaatctctaagaagacgtcttttccttcttgaagcgtctgttcgacataatcaacgggcgttccgtaatagttgccgacatattctgcccactcaagcagtttgttgttttcaatcatgcgttcgaattcatctctagatttaaagaaataatcgacgccatcgacttcgccctctctcgggtttctcgtcgtgactgaaattgagtattcaaatttcgtgtcctgttgtgaaaatattgcttgccgaaccgttccttttccaactccggagggacctgagagaacgattaataaccctctttctttcatgcggcaattacccctgcccttcatccataatttcttctttcacagaaagtctgtgtgcaactgtctcaggctggacggcagataagataatgtgatcactatccatgacgacaactgcacgggttcttcgtccgtatgtagcgtctattagcattccgcggtctcttgcatcctggatcattcgctttattggcgcagactccgggctgacaatcgaaatcatccgattggcggagatgatattgccaaatccgatattaatcagtttaatcgtcatcttctacgttccccctgtaaaatagacgtctctagtgtaacctgaagaggccgtctgtaaacaatacgcacagtcgctattctatattttgcacttgttccttcaatttttcaatagaacttttcatttcaacgacaagctttgtgatttgatgatcattggcttttgagccgatcgtgttcgcttcccggttaagctcctgaacaaggaaatcaagtttgcggccgactgccccgccttcttttaatatatcacggaattgaacaaaatggctcttcaacctggtaatttcttccgttatatcagaacgatcggcgaaaatggcgcattccgtgatcagcctgctttcgtcgagcgcatcctccgtccattccttcattcgggcgtaaagacgctcgcggtattgaataacaacggccgaagcgcgctctttcacctgttcggacagcgtctcaagccgctcaatgtgcagaaagcagtcttccgccaaaagccgtccttctttttccctcatgtcacaaagttcctttacagccagctcagcggcttccctgatgacttcttcaagcttgtcatcacgcatttgttcttcgtgtatctgcgcaatatgttcaaatttaaagaactccattgcatcgggttctgcggccaggctgtagcgctctttcatgacgcgtgcggcgctcacatattcatcaaggagctcccaatcgatgttcaggcttctttttatgagcgcgtcactgtttacagtgagaaacagctctactcttccgcgctgtatatgctgcaatatcgtttgtttcagcttatcctctacatatagcaaaggccgtggcaggcgggcgttcacttctttgaaccggtaattgacggatttcaattcaacggttgccgagagatcgccttttgtgctgcttgcgctgccgaagcctgtcatactccgtatcatatgaaacacccaattctttcccgttatcaaaataaaagggcaatagacatgctattacccctaagattatatcatatggaattatttttttcttgtcaaaagtgaacccgccagcaaaaaagtaggtatgcccgacataccgataatcagcatccaatcgcccggcgtaatcggcactgttttgaaaatcggctgcagcggcggataatagatgacgatgaccatcaggaagatagaagaaatgatggccccgagcagatagatattttcaaacggattccgggagaaaacagacgtttcgctccggcagtcaaacacgtgtataagctgagccaggacaagagtcgcgaatgcaacggtctgtgcgtagggcagattttcaggattgcggtgatagacgatgataaacgctaaaatggttgcagctccgattaaaaaccctcttgatacgactttccagcccagttttctcgcaaacactccttctttcgggtgccgcggcttccgcctcatcaggtctccttccggctgatccataccgagggccatcgccggcagcccgtcagtgactaagttcacccacagtatctgaatcggaacgagcggcagcggcagagcgagaagcatcgcaaacagcatcactaaaatttcaccgacgttggaggcgagcaaataccggacgaattttcttatattttcatagatattccgtccctcttttatggctgatttaatcgtagcaaagttatcatctaccagaatgagagaagaggcttcctttgccacatccgttcccgtcacgcccatggcaacgccgatatctgcctgctttatggccggcgcgtcattaaccccgtctcccgtcatggcgacgacgtgtccgttttcctggaacgctttgacgatttttaatttatgttcaggcgacacacgtgcgaagacgtagacatcatcgaccgtttcgataagttctttctccgtaagctcattcagcgtcttcccgtccatcacacgcccctttttcggaagaagacgcaaatctttcgcaatggcctttgccgtttcgacgtgatcccctgtgatcataaccgttttaatgccggcttcacggcattctttaatcgcctgtctgacctccggacggggcggatcaattatgcctgacaagccgagcatcgtcagatttttttccgcctgctccattgtcggtttttctccgggcttaagcggtttataagcaatcccgatcgtacgcaaagcttgcgacgccagctctttcagaaccgcttccgtttctgctttcttttctccagaaaatggcgcgcttcttgcgtcgtacatcagatgtgacgagcggtcaatcagcacatcgggcgctcctttagtgatgacgaactgctttttttcctgatcctctacaatgacggtcatcattttgcggacggagtcaaacggaaactcggcaaccacgcggtagtgcccgctgagccaatcgtttgaatagccgccctttcttgcagccgtcagcagcgctccttctgtcggatcgccgtcgagtacataatggccgtctttcagtgcgatttcggatgtgttgcacaacgcgccgaaaaccagcatctgttcaagaatcttctcatctttcggcttgatttcccgctcatctcgggtgaaaacgccctccggctcatagccgatgcctgacactttaaatgtttttccccctgaccacatatgggtgacggtcattttgttttgtgtcagcgtgccggttttatcagaacaaatgacagaggcgcagcccaatgtttcaaccgccgggagctttctgacaattgatttttgtttgatcatgcgctggacgccgattgataatgccaccgtaacaatggcgggaagcccttccggaatcgcggcgacggccaatgacaccccggccaaaaacatgctgtaaagctcatgtccctgtaagacgccgactgcaacgaccaataccgttaaaaggagcgcgacgataattaaaattttgccgagctcttcaagtcttcgctgcagcggtgttgaaaggctgccggcggattccagcatatcggcgattttccccattgccgtattcattcctgtaccgacgacgacgccgacaccgctgccgcgcgttacgatcgtacccataaacgccatattgctgatgtcgcctaacgaaacatccggctttctcagtttatcagcttgtttaaccaccggaattgattccccggtcagcgccgattcctcaatttcaaggcttttcgcttcaacgatccgcacatccgcgccaatccggtcgccgcttgaaaatttcatgatatcgccgggaacgagctccttggactgaattttcttccagctcccgtcccgcaacgctgacacatacggcgttgacagctcttttaatgcatgtaaagacttttccgcccgccgctcttgaaaaaaaccgagaaccccattgacaaatacaatcgccataatcgctacggcatctacatattcgcctaaaaacccggatattaaggttgccgccagcagcacgagcaccataaaatctttaaattgggcgaaaaacacggcgatcgccggtgtcctcttgccctcctgaagctcgttcggtccgtgcttttcaaggcgttttttcacctctttttcggtcaacccctgtttaatggacgtatttgttgctttcagcaaatcggtttgtcccatttcatgaaacttcattcttctcgtccactcccctgcctcgctttagagatgtcactctgtaaacaagcttattctgactcgtcccttttcatgctataattatcgaatgcaggaagaaggaaagggtgttttatatgtcttttgatggcatgtttacatacggaatgacacatgaattaaacagccggatcgccggaggccggattacgagagtccatcagccttttaagcacgatgtgatatttcatatccgcgctaacggaaaaaaccataaattattattatcggcgcatccgagctattcacgggtgcacatgacaaaccaggcctatgaaaatccgagcgagccgccgatgttttgtatgctgctcagaaagcatatcgaaggcggatttattgagaaaatagaacaggccggattagaccggattatgatattccgcataaaaagcagaaatgaaatcggcgacgaaaccgtcagaacgctgtatgttgaaattatggggcggcacagcaatattattctgactgacggagaaggagccatcatcgacgggctgaaacatttatctccgtcgatgaacagctaccggaccgttctgccgggatatgattacaagcttcctcccgctcaggaaaaaatttcgccgcttgccgcggatgaagaggacgttttgcgttatctcagttttcaggaaggacggcttgaccagcagatcgtcagacatttctccggtgtttctccgctgtttgcaaaagaagccgtgcacagagcgggcctcgctaacaaaataacgctgccgaagacgctgattgaaatgttccatgccgtgaaagattgcaggtttacaccgaacattacgacagccggcggaaaggaatacttttatctcctgtctctcacacatgtaaacggagaggagcgcacctttcactcactgagtgagctgttggaccggttttatttcggcaaggcggaacgcgaccgcgtcaaacagcaggctcaggatcttgagcggtttgtcgcaaatgaacggaaaaagaacgccaataagataaaaaagctggaaaagacgctcgactactcagagaatgcgaaggaattccagctatacggcgaactgctgacggcaaatttgtatatgctgaaaaaaggtgacaaagaagcggaagtcatcaattattatgatgaagaaagtaagacggtgaccatccctttaaatccgaacaaaacaccgtcagaaaacgcgcagatgtattttacaaagtaccaaaaggcgaagaattccgtcgaggtggtaaaagaacagatccgtctggccgaggaggaaatcgcttatttcgatcagctgatccagcagctctcctccgcctccacaaaggatattcacgaaataagggaagagcttgtggaaggcaaatatctgcgaccgaaacagcagcgaggacagaaaaaacagaagcagcacgttcctgttttggaacaatatgaatcttcacggggattgacgattcttgtcggcaaaaacaataaacaaaatgagtacttaacgacaaaagctgccgcaagggatgatttatggttccacacgaaagacattcccggttcccacgttgtgattaaaagcagcgatccggatgaacaatccatactggaggcggctgcgatcgccgcttatttttccaaggcgaaagattccggctccgttcccgttgattatacaaaaatcagacacgtgaaaaagccaaacggcgcaaagcccggatttgtcacctatgacagccagcataccgtatttgtcacacctgatgccgaccttgtcatacggctgaaaaaataaacacacctccaagctgaaatccgcactcagcttggaggtgttttttcttacgtataaacggagacgacactctcccagccatcagaaccgatctttacaatatctgatcagtttcccgtcatgtctgcctgatccgccggggaccgtcctctgattaaagcggtcacacctgatttggcggcggatactatcaccttccctcgtcaaacctgaacacatccggcccagttaatataatcatgccgggtctctgacctttcctttgtatgcgggcggaatccaggcggcattgggatcagatacatattccgcgtcacttcgcaatcctgaccgcttgccggcatataccgttcaaactgcccgctttcgttttgaattgttcacaatcggggactgtcaggacagtataaaaaacaccctgcctgagggactgccccccgtttttgagacaggggtcaaaacaccttttaaacagccaattgccgatagtttatcggtgattggttgtttagtttggtttgaatacgaatattgttataataatgaatgtattctatgacagtgcgttctacgatggcagtcgtagttcgatcaatgctgttaagatagaacgtttcagactttagcgaggaatgaaacgattcgatggaggcattatcagcgggcgtccctttgcgggacatgctcatggtaatgccttttgttttaacagctttttgatactcgtaagatgtatacacagaaccttggtcactatgtaacacgcagttctcaggcagcattggtagctgatcaagtgtgtctaagacaaaggctgtgtcctgcttatccccaatagtaaaagcaatcacttctccattgtataaatctaatatactggaaaggtacaattgtttctgtccataaggcaaatatgtgatgtccgttactagtttttcaagaggacgatcagactgaaagttccgatccaatatattatcgaccacggcatatggctgcccatccttcttgcgctttttcaccttaacccgacactgccattgatttttctgcataatacgttgaaccgttttatggttaatacacattctcttttttagtatggctgtgatttttcgatatccatatcgatacttgtgctctcggcacaacgtgccgatttgtttttccaaatggcgcttgggatgatccttcatcagattcttcttccaacgataataagacgctcgagagatacctaaatgaatacagatatcctgtacggtcattgtgctgtgcaatatttctacaagttcgactgacgtttcgctatcaacttcctttccaattcgttgtacttttttaaaacttcattctgttgtctcaggtaacgaatctctgcctgcagtttctctaaatcggaagaatactccggaccttttccgtaagtgtattgctttccaacaggctgttcgaatcgatgtgtatcaccagccttataccatctaacccatgtctgaacctgtgtcttattcttaatattcaactcctgcatgatctctttcataggtacgcctgccaatctcatttctacagccttctgtttcgcttcaaccggataactcactcttgtccccatagaaaaaacacctccaagtctaatttcggataacaatcatccgtattcaaacttgaaggtgtttttatttgtctcatcttatggggtcagtccctgatgacagacaaggtgttttttatggtcttcttcttttctcaaataatcgatccacttcttcagccaaatcagcagtaatgagatgctctatgtcctcagccagtcttttcgtatgtgccgggcttgcgccgcttgttgatacggatacttgaatgcgccctttgcggatgatcttcggcatatacacgctgccctgttcagcatcgcttacacaattgaccagctgcgtttcagaagcgctcgcggctatctcctgattcacgttgcggtcatttgtcgcggcaatgatgaaaaaagcgggcgcgagatccttcatttcaattttacgggaaacccagcggatgcgtccttcatccgccagctgtttaatttcgggcagggcatcgggactgattacagtaatatccgcgccttccggaagcaccgttttgagccttctaaaggcaacattgcctccgcccgcgatgataattctttttccgcttaaattaatgtgcagaggcagcatactgtccccccttaaaatcaaactgaccgccggggtttcgaacagcttctgacacacggttcaaaaacgcctgcttaatatgcgggtgaaaacctaagtatgaagcgagatgaacattttgattgaccgtttgaagcttttgaacttcccgttcaatctcagtcattaaaagcccggtaaacagaagatatggaacgttaaaaacgggtgctccgtcatcctcttcaaggccggcaaacacttctttatagtgcggatcacatgctgttaaaaaacaagggatgacttctttaacaggtgtaatcgcctcaagttttccggcaatctcactgactgcgttcttaactgccggatctgtgcttcctcttccgatcagcaccactttcgcctgctcaatgggcactccggtatcttcaatgcgatgatgcaccgcttttacgacttcatcgtccactccgatcggaacaccatatgtcacttttatatcgggatgcagggccgccgcacgggcgatttcagtcggaatgtcatgttttgcgtgggcagcggtcaacagcagtaaaggcacggccgcaatatgagtggcgccttgtctgacacatgcttcaaatcccgcttcaatagacggttcctgcagttctaaaaaacaaatttcctgaatgggagcgtcagcgtgcggcatgcacccttttaaaaacgccgccgactctgtctgcgcttttttcagcctgcttccgtgcccgatgtataaaatcgcctgcttcatttacaacgcctcgctcaaatccagatttttctgttcagatgcataccagtccagtttgcagtgataattgacgacatcgccgataacaattaagctcgggtttttgatttcttcttttatcactgtgtctgaaagcgtgccgacggtgcagacgactgttttttgcctgtccgtcgttccccaatgaataaaggctgccggggtgccggcgtctctgccgttttccagcagcattctttcaatctgccggatatttttaattcccatataaatcaccagcgtatcaatgcccgtcgccagcgctttccatttttcttcaaagtcgtcttcttgtttataatgtcccgtaacgaatgcgacattggagctcgcctctctgtgcgtcacgggaatgccggcataagcagcagccgcgattcctgatgtaatgccgggaacgatctcaaacggaatggcgttttgtgcgagagcctccgcttcttcgcctccgcggccgaaaacaaacgggtcgccccccttgagccttacaacggttttcccctttttcgcatacttcacaaggaaacggttaatcgtatcctgtttcataatgtgaaaatccgggagcttgccgcagtaaatcagatccgcttcttctccggcatactgtaaaatctctttgcttaccaatctgtcatataatataacgtccgctttctgtatggctttcattgccttcaccgttaataagtccggatctcccggaccggctccaacgataaatactttccccatagcatgtctccccgatccgttttgaaatcttcccagaacagccgcgaggccgcacttcagctattttaccatatcccgccattgcgggggatatccggctgattgcgcggcctttttggacctattatgctaagctgtttttcacaaagtcaaccagtcttccggtgcattcttcgcgttcacatttccctgaatcaagtacgagctcaggcgctttcggctcttcatacggcgagtcgatccccgtaaagaacggaatttcaccatttcttgcttttttatataaacctttcggatcgcgcttttcacatatatcgagatcgcatttcacgtagatttcattaaattcgccctctgccacaagctctctcacctgatctctgtcctcacggaacggagaaataaaagccgtgatgacgatggttccctgctgaacgaaaagcttcgccacttccccgatgcggcgtatattttccttgcggtcatcatcggaaaaacctaagtccttgtttaagccgtggcggatgttatcaccatcaagcacgatgacttgatagccttgttcaaacagctcgcgcgctgcggcgtttgcaatcgtggattttcctgaaccgcttaagcccgtcagccagaggatagagcttttatgcttgtttttctgctggtattcttctttcgttattgaggcttcatgccacacgatatcacgatttgtcactctattttcctccttaagaaacgcctgcttcttctttcgttttcagccctttaatcaacacctcgacaacttcaggacggctgaattccgccggcggcatgacgccgcttcgcagcatttctctgacctttgttcctgacagaatgacgtggtcttctctgtcatgcgggcatgttttggccgttcccatgttgccgcatttctggcagaagaagctgtgctcgaatttcatcggtgtaatcccgagttcatccgctgtaaattgatcaaacagctcttgcgcttcatatgtgccgtagtaatcaccgacgccggcatgatcgcggccgacgataaaatgcgtgcagccgtagtttttgcggacaagcgcgtggaaaatggcttctctcggccccgcataccgcatagccgccaaaaatacgccgaggaacacgcggtctttcggataataatgatcgagcagcacctggtagctttccattctgacatccgccggaatgtcatctgattttgtttcaccgacgagcgggttcaaaaacaggccgtcaaccgtctcaagcgcggttttttggatatattcgtgggcgcggtgaaccggatttctcgtttggaaaccgacgatggttttccagcccttttcttcgaagcttcgtcttgtatcggcaggttcaaatgtaaactcgggaaactgctttgacgcttttttaactaatgtgatcggcccgccgacatacgtatcgccgcgtgaaaataattttttcacgcccggatgcgcggcatcatcggttttatatacgtgaacggcttctttttgtttatccggcgtataaatatcttcgatgtcgactacgccgtatgtttctccgccgtaagtcagtttcaccgtgtcgccgacggcaagctcagccgctttatctgaatcgaccggaagcgtgatcggcagggaccagacaaccccggatgccagacgcatattttcaacgactgacacgtaatctttttctgtgaaaaatccttcaatcgggctgtaccccccgatcccgatcagctctaaatcagcgaacgaaatcaaatcaagctcaatttctttttggacggatgtaagatcatactgctcatttacccgattaattaatgttcctccgtgcggtgctaaactcataatacatgattcctcccagttaacagataaataaactcagattaatagttaaatgcctccgccttgttcatggacagagcgtttctcttttcggatggctttcatcagactggcggctccgccagctgccaaaagcacgctggccatcataaagatggaatagtaatctccttttaacagcagggagacaagcaaatacgaaatcgacagtgacaaaaacggtgaaacgacccatactttgagcatcgttttcacgacttctttatgaaaaacgttcggcccgtttttggccattccgataccgataattgatgatgatgtgacttgcgccaatgggaccggcagaccgaagacggaactgataatgacaagccccgcgccggttcctgaaagcagtatgccttctccggctgaaaatctcgtaatctttttcccgttggtttcaagcactttgcgtcctaaaagcagagcgccgagagcgacaaagatgcctccgtacagcgttcctttggacacgctgagcacgcccgcagcaaccaaagggcccaccgcatttgcgacattgttcattccggctgaaaaagcttcccaaaaccccgcaatcagcagcacaatccctaaaatcttctgtttccgactcgaaatgactcgaatattcagagaactgaataccttcgagacgagaaacgtgaaacagaacgcgacgaacggtacgagcacccaaaaaatcacgatgactaaaagatgctgtaaaaacaatactttgtacgcgacgccgacaccgacaatcgccccgacagtgacctcactcgtcgacagcggaatgccgagcacattcgccgtgaataatgatagcgccgccgatccgataataatgcagacaatggtgagcgaaatggtttgttcgggaatgattccgccgctgatcgtcttaacgacttcaccgccgccgataaccgcccctgacaggactccggccgcgcagatgatcagcgcatacgttttctttttaactgcgccggacccgtaagcgactcccattgaagccgcggctccgctggctccgatattcatggcaaaaaacaggcagaataaaatagcggctaattccatcgtgcagctcctttattcatgcagtccgcattctgttttcgccatgccgttccatctgccgctccgcaaatcttccgcggtaaacgcaggtgaagtgcacggttcacagccgatgctaggatacccctgatcgtggaggatattgtaatccagctcatgcttggaagtatatctccagatgtctttccatgtccaatggatcagcgggcatactttaatcgattgaaacttgtcgtctttattcaggaaattcgtattcgcccggctcggcccttgatcccggcgaaggccggacagccatgccggatgccctgcgagcgcttctcttaacggcagaatttttctgatgtagcagcactggttcggttctctttcccacagtttatctccgtgagcctcggcctgttcttcaagagtaaggcttggctttttcaggataatgttcagtcccgggtaacgctctttcactttttcgatcgtttcatatgtttctttaaagtgaagacccgtatcaagaaacacgatttccgcgtctttctttactttagaaattaaatcgatcaggacgatgccctcaatcccgaagctgcacgcgtaaacaagctggtctccgtagtggccgtatgcccattttaaaacggacagcgcgcctttataggaatcgtcttccggaaatgtaatcgccggctcttcccatgtgtcatacgttagcatttttcctttcctcctcccggagacaatcaatcagctgttgttttctgccggttgtcttatccctcaatctttttttcatataaaaaactttcaatccagcggaatgaaagacagtgacccggtatagcccttatcttcaaaatgctgtgcatttttctggatgcggcaccttgcatgacacgcaggttgccgggcgtcatcggtccagtccctcagccgctcttgataagctttttagatttgtactaaattttagcacaattctaacagaagtcaacccgagttttttgataggaataataaaacaggccctgaggcctgtttttattgtcattattttttaaaccaatcttttgactcgggattctgtttccatgatttcagtttctcaatgtcatctgaatgaatcgttccgttttcaagcgcgacttcaatcagcgtgtcataatccgttaacgagtaataaggaagacccgcttttttaaaggcttcttttgctttcggcagtccgtatgtaaaaatggaaatgacgccgaggacttccgcgccctctctttgaagggccgctgcagcttcaagcacgctgcctccggtagaaatcaagtcttcaatcacgactgttttttgcccttttttaatggcgccttctatttgatttcctttgccgtgcgctttcggtttgcttctgacgtagcacatcggtgcgcctgcacggtctgcgagaagcgcagcatgcggaatgcccgccgttgcagtacccgcgatcatctctgcctcgggaaaatgctctttcagcagtttgccgagcccgtccgccacatcatttctcacttttggatacgacaatgtcagacggttgtcacaatagatcggtgataaaatgccgctcgcccacgtaaacggctcattcgggcgtaaaaagacagcttcaatgtgtaatagatgttttgcgatagcctgtttcatcggcgaacgccctcccattccagtttaattgcttcatatgcttcaacggggttttccgcttttgtaattgagcggcccacgacgatggctgacgaaccgttttctttcgcaaatgacggagtcgccgtccggacttgatcgtcagctgcgtcactggccgtgcggatgcccggtgtgactgtcagaaatgaaggccggaccgcttcataaatggcttttgtttcatgtaccgaacataccactccgtccagcccgcactcttccgccattttgccgtaatgcacgaccgtttctaacagcggcttatgcagcagaagctcttccttcgccacctgctctgaagtgctggtcagctgagtcaccgcgattaaagacgggcgttttctgcctgccggcgtgccttcttcaagcccctcaagggccgcgcgcatcatgcgtgcgccccctgccgcatgcacattgacgagatcaacgccgaggccggccagccgcttcatcgctttattgaccgtagtcgggatatcatgaagctttaaatctaaaaatatatcacagttccgttcttttaattggtgaatgatggcggggccttcctgataaaaaagttccatcccggttttgacaaaaagcctttccttttcaaacaagtctaaaaacgttaaagtctcttcccctgatgcaaaatcaagcgcgatgatgggcaggttgtttttcatgtttccagctccttccgatgcattcacttacagattgaaagccgtgttggctcagtacacgggggagctgttctatgatttccgggcagacgaacggattgacgaagtttgccgtgccgacggcaaccgcactcgctcccgcaagaagaaattctaatgcatcctctgcggtctgaacgcctcccatcccgataatcgggatttgaacggcctggctgacttcgtataccatccggatggcgaccggtttgatcgccgggcctgacagtccgcccgttttatttgctaagatcggccgtcccgtcttgagatcgagcctcatcccgatgagtgtattaatcatcgtcagaccgtcagcaccggccgcttcaatcgctttggcaatttcggttatgtttgcgacattaggcgaaagcttcacatacacaggcactgcggaaacttctttcaccgcttttgtcagttcggccgccatgacgggatcagtaccaaaagcaatcccccccgttttgacattcggacatgaaatgttaacctcaagcgcatgcacattcggcgcttggctgatgtgctcggccacttctttatagtcgtccacctgagaaccggcgacatttgcgataatcggtgtgtcaaattgttcgagccaaggcagctcatggttgagcacatgctcaaggccgggattttgcagtccgatggcattcagcattcccgcgcttgtctccgccactctcggcgtcggatttccgaagcgggcttcgttcgtcgttgctttaatcataatgcctccgaggcatgataaatcgtaaaatccggcatattctttcccgaaaccgaaacatccggaagcggggatgatcgggtttttcaattggagacccggcagattcacctctaacattacagcgccacctcctcagctttaaataccggcccgtcaaggcagacctttacataggatgtatcgctttcacccgtacggcacacgcaggcgaagcaggctccgatgccgcagcccatccgctcttccatcgaaagataaacctctttatggccgtactgctgcttcagagctttcagcatcggtgtcggtccgcagcttagcaggacatcgaattcgagctgcttttcacggatgacatcggtgacaaaccctttctctccatatgtaccgtcagccgttgccacataggtgtctccgtacgcacgacattcctgttcgtaaaaaacatcctttgctgattgaaatccaagcacatgaatgacgtttacgcctttttccgtcaggcgctttgacagttcctgcaaaggcggaaccccgactccgcctccgactaacagcgcggttttgccgggttcaatccgccggacggggaatccgttgccgagagggccgagaacgtctatcctgccgccctcttttttctcggacaaaagacgcgttccctcaccgtcagctctgtagataacggatacttcattcgcggcgaaatcgacgtccgcaatgctgagcggtcttcttaatagcggcgtgaccgcgtcactcaccttcagatgtagaaattgacccggctcggtaaggtgccggacaagctctcctttcagcaccatcttataaatccggtcggcaatttctaagttggattgaacagtcaaatgcgcttttttcatatcgtggctgccgccttttgattggtttcggatgcaggcatatgatccgcccggaatgtcatgctttccaatacccgcaaaatggcttcagccgtatctaaagatgtcaggcaggcgactccattctcaacggattcgcggcggattctgaagccgtctctggccggctgtttgccctttgtcagcgtattgatgacaaattgcgcttcgccgtttctgatcacatcgagcagatttttcccttcttcgccgatttttccgacgacttgagccggaatctgagcgtctttcaaataagccgccgttccttccgtcgccaagattttatagccgatggcgtggaaccgcttcgcgatcagcagtccttcttctttatctttatcggcaacagtcaacagcactgagccgtagttcgggatttgaatgccagaagcaatcagcgctttatagagcgctttttccagggttgaatctttgcccatgacctctcccgtcgacttcatttcagggcctaacgtaatatctactcttctcagcttcgcgaatgagaagacaggcgctttcacgaataccccctgctgttcaggctgcagcccctcttgatagccgaaatcagcaagcttttggccgagaatgacctttgtcgccagattcgccatcggaatctttgtgattttgcttaagaacggcacggttctgcttgaccgcggatttacctcaagcacatacacttcaccttgcgacagtacgaactggatgttcagcaacccgatgatgttaaggccttttgccaaggctacagtgtattgttcgatttttttcttaatgtcttcgcttaaagactgaggcggatagacggcgattgaatcccctgaatggacgccggcccgctcgatatgctccataattcccggaataacgactgtttcgccgtcagatacggcatcgacttcgatttctttccccgtcagataacggtcgattaacaccggatgctgcgggttgattttgaccgcatttttcatatagtgaagcagctcttcttcgtgatagacgatttccatcgcccggccgccgagcacatacgaagggcggacaagtaccggatagccgatggatgcggcaattttgaccgcttcgttcaccgacacggcggtttttccgagcggctgcggcacattcagcgcctcaagcgcctgctcaaacttatcccggtcttccgcacggtctaaatcttcaagtgatgtgccgaggattttgacgccgcgggcgctcaattcttccgcaagattaatcgccgtctggccgccgaattggacgacaacgccttccggctgttccaaatcgatgatgtgcatgacatcttctaccgtcagcggttcaaaatacagtttgtctgatatgctgaaatcagtggacaccgtctcagggttgttgttgataataatcgcttcatagcctgcctgcttgatcgcccagacagaatgaacggtcgcatagtcaaattcgacgccctgtccgatacggatcggcccggaaccgaggacgacgacgctttttcttgatgtaacctcagactcgttctcttcctcatatgtgctgtaaaagtacggggtttctgattcgaattccgccgcacatgtatccaccattttatatacaggcttgatgtctgcttcttttcgcatttgatacagctcttgttccggcatattccattcccggctgatatatttgtcggagaaaccgagttccttcgctgtctgaaggacggcgaggctgcctttttccgctttcagctctgtttcaaaagcgaccagcttacagagcttgtgcaaaaagaatacgtcaattgcggaaaactcatgaagctgctccactgtatagcctcttctgaacgcttcagcaagataaaacaggcgttcatccccggcttttctgatccgtttttccaaaagtccgtcagaaatctcttccgcatccttcagttccaggtgatagacatcggcttcaagtgagcggaccgcctttaacagcgattcttcaagggtgcgcccgatggccatgacctctccggtggctttcatttgcgttccgagcctgcggtttgccgactcaaatttgtcgaacggccagcgcgggatcttagaaacgacatagtcaagcgcgggctcaaaagccgcatatgttttccccgttacgggattcatcatttcatcaagagaaagcccgactgcgattttcgccgcaagctttgcgatcgggtaacccgtcgcttttgaggcgagggcagatgagcggctcacccgcggattcacttcgataatgtagtattggaagctgtcgggatcgagcgcgagctgaacattacagccgccttcaataccgagcgcgcggatcagctttaatgaaacattgcgcaaaagctgatattcccggtcgctcaaagtctggctcggggcaacgacgatgctgtcgcccgtatggatgccgaccggatcgatattttccatgttgcagacgacgatcgcgtgatctctgctgtctctcatgacttcatattcgatctctttgtaaccggcaatgcttttttccagaaggcactgatggacggggctgagttttaatccgttttcgacgatctctttcagttctgcttcattcgagcagatgccgccgcccgttccgcctaatgtgtaagcggggcgcacgataaccggaaacccgatccggccgacaaattcctcggcttcctgtaaagtgcggatgatctcactttccggcaccggttcattcagctcattcatcagcgtacggaataagtcgcggtcttccgcctgctggatggcggacagctttgtgccgagcacttccactccgcattcctcaagaaccccgagttcagacagctcgacggcaagattcagtccggtctgtcctcccagagtcggcaggatggcgtccggccgttcttttctgataatacgcgtgagaaactccggcgtcagcggctctatgtatacccgatcagccatttccgtatccgtcataatcgttgccggattcgagttgacgagaatgacttcatagccttcttccttcaaagcgagacacgcctgtgtgcccgcataatcaaattccgccgcctgtccgataataatcgggcctgatccgatcactaaaatctttttaatatctacgcgttttggcataccgcttccccttctttctcagttgtttcgatcaagtcaatgaatctgtcaaataaatgattggcgtcttccggccccggtgaagcttcagggtggtactgaaccgtaaatgccggcaatgttttatgcttgagtccttcgatcgtttgatcattgatcgcaatgtgcgtcacttcaagctctgtctcatctattgaagaaactgtatatccgtggttttgggcggttaaagcgactttccctgtcgcaagctctttaaccggatgattggaacccctgtgtccgaatttcattttttccgtttccgctccggatgccagtgcaaataattggtggccgaggcagattccgaataacggcaccttcccgagtatgccttttatcatttcaatggcttccggcacatctttcggatctccgggtccgttagaaagcatgatgccgtccggcttgagctgaagcacttcttccgccgttacattgtacggcacaacgatgacatcgcattttcttttgtttaactctcttaaaatgccatgcttcataccgaaatcgacgagtacgatgcgtttgccgcggcccggactcggatatgccgttttcgcagatacttgagcgacttgatttctcggcagttccgtttctttcagccttgcaagaacctctccgacattctcctcacttgaagcaaacgttccttttaatgcgccggccgtgcggatcattcttgtgagctttctcgtgtcaatcccttgtaagccggggatatttttcattttcaaatactcgtcaagcgtgtaagccgaacgccagttggaaggcagctcgcacagttcttttacgatcagcccttttacaaaaggagtgatggattcaaagtcatctctgttaattccgtagttgccgatcagaggatacgtcagcgtcacgatctgcccgcagtaagaagggtctgataaaatttcctgataaccggtcattcccgtgttgaatacgacttcacccgcggtatgctccaggctcccgaatgcttcaccctcaaataccgctccattttccagcactagtcttcttttcatttgacgagtctcccttcttcgtatgcaagcttaccggcagccatcgttgcaacaggccagccgaagcacttcatcttgttgaatggcgtattttttcctttagataaaaatgtatctttgtcaatggctgcttctttttccagatcaatcagggtgatgtcagccggcgcccccggtgcaagcgttccgtacggaagatcaaatgcctcgcaaggttttaccgtcatgaaatcaaccagctgcttcagcgtccacgccccgtttttcacaaaatgtgtgtacagaagcggaaaggctgtttctaaaccgacgatcccgaaaggcgcaagcttcatatccgtgtttttctcttcttctgtatgcggcgcatggtcagtggcgatgaaatcaatcgtaccgtctaaaagcccttcaatcagcgcctctctgtcctctttgctgcgaagcggcggattcattttaaaattggtatcaagtcccgggatatcttcgtcacaaagcagcaggtggtgcggcgacacttccgccgtcacgcggattcccgctttttttgcgtctcttacggctctgaccgattctttcgtgctgatatgacacacgtggtaatggcagcccgccgcttccgccagcaggacgtcacgggcgatgtgtaccgcttcacaaatggaaggtatgccgttcaggccgttcgcttttgaaaaagaaccttcatgcacgctccctccgtaaataagtgagttatcctcacaatgagcgacaatcgctttattcattgaagccgcccgtttcatggcttcatacatcattccggccgtctgaacgccgacgccgtcatcggtgaaggcgaatgctccggcttcatgaagcgccttaaaatctgtcatttcttcgccggtttgcctgatcgtaatggatgcgtaaggaagaaccctgacagatgaggtttctttgatccggttttgcagccattccatctgctctttcgtatccggcaccggtcttgtattcggcatggctgcgactgtggtaaagccgcctcgcgccgcggctttagagcccgtctcaatggtttcttttttctcgccgcccggttctctgaagtgaacatgaaggtctacgagtcccggtgaaacgaacagtccgtcagcgtcgatcaccgtttctccgtctttcgctgtcagaagcccggtttccgaaatgaattcacccgttacccggatatcctgtgccactttttctccctgttcatttaacatccagccgttcctaatgagataagacataagccgcttctccccttttcacattggtttgcagtgctctttttaagactgccattctgatatacacgccattttccatttgtttaaagattcttgattttccgcattccactaatgttgtgtcaatttcgactcctctgttcaccggtgcgggatgcatgatgatggcatgccgcttcatgctctccgcccgctttgcggtcagcccgtatgcttccaggtagcctttttggtcggcttctgtctgatgcctttcattttggatgcggagcagcatgacgacatctgaagcttgtatggcttcatccgtctgtacacaggtgccgaaggcgtttttctcatcctgccattgcggcggaccagaaaacagcacgcgtgcgccgagccttgtcagcacctcggcatttgaccttgccaccctgctgtgtttgatatcgccatgaatggaaactgtcaggccctgaaaggtctcaaattcctcttgaatcgtcattaaatcgagcaatgactgagtcgggtgctggccgcagccgtcgccggcgtttaagatcggaatattgactctgccggtcagatctttgtaatattcatccgtgctgtgcctgatgacgcaggcgtccgctccgattgattccagagttttgaccgtgtcgtataaggactcgcctttttgaacgcttgtgctcgtatcgtctaagctgagcacgttcatcccgagtttcttttccgccacttcaaagctgaaccgcgttctcgtgctcggttcaaaaaacagattcgcaacaaattttcccgcgagatcggggcggactgttccctcttttatcgcttttgcctcacgcagcagttctgtaatttcagctgcgctcagttcagacatcgccgttaaatgattcatgtttttctcctccgtttccgcttgaaggccgtaaaaaaacaccccggtctatagactcggggtgcggttaaagagagaagcagcgtacagcttcttcccgttataacccttccaagcctctctggactttctttaaaaggtttcacatatgattttgtttttctgatgcaatcgcgtcttcttcatttgcatgcggcaggataaggttcaggatgactccgacgattgccgcaagcgccatgccggatatttggaacccgccttttgatacttgaataaaagcccctccgacaccgatcacgaggatgacggatgtgataattaaatttctcttgttttcataatcaatgttgttgtcaatcagcattcttaagccgctggaggcgataattccgaagagcaggaaggaaacgcctcccataaccgcggacggaacagagctgatcagcgctgatacttttccgataaatccgaagcacagcgcaatcacacccgcgccgccgatgacaaagacgctgaaaactctcgtaattgccaggactccgatgttctcgccgtatgtcgtcgtcggcgggccgccgattaacgaagcgatgatcgtcgcaacactgtcccccattatggagcggtgcagtcccggctttttaatgaaatcctgtccgacgactttactcagcaccatttgatggccgatatgttctgacatcgtcacgaaagcgaccggcaccatcgcagccgcaatgcccaatgtcactgacggcgtatagtctttgaaagggatgataaattcaggaacggcgaaccactttgcatcaatgaccggctgaaaattgacgatgccctgtgtcagcgcaaacagatagccgcctataatgccgatcaataccggaatcaggcttaaaaatccccgtaaaaagatggcgcagataatggtgatggccaaagtgacgccggctacactgaaatgtttcaagctgtagacgagttccttcgcattcggatcagcatacattgccatattgacggctgtgcttgccagtccgaggccgatgacgatgatgaccggcccgacgaccaccgggggcagcagcttcatcagccaccccgttccaagctgcctgatgagcagtgcgatcaggccgtacacaattcccgccaggaaagcgccgaccatggcagcccccggccctcccgtcgccttcaccaagataatcggtgatataaaggcgaatgatgagccgagataagcgggaatctggccttttgtcaccaagagataggcgagtgtcccgattccgctcgtgacaagcgccactgccgggctcattccgaccagtttcggcacgagtatggttgaaccgaacatggcgaataaatgctgcaggctgaatgacagccaagacaatggattggggacgtccctgactcccaggtttacttttttcttactcatggcgttttcctcccggttgactttcaaatggtataaaaaaacctctttgcttttggcgcaaagaggcatacaaaacccggccgcgtcgatccgcccggctttgtgttttaaaatcctctttgcaaactctctggaatgcatttaaaaagggtgattattcattttcgtaaatggcgaccatatcagtctgatcaacttcgctcagctgaaccattactttttcagcttttgaggtcggaatgtttttcccgatatagtccgctctgatcggcagctcccggtgccctctgtcgacaagcacggcaagctgtatcgatgacggccgtccgacatcaacgagggcatccatcgccgctctcaccgtccggccggtataaagcacatcatcaaccacaatgaccttttggtctgtaatatcggccggaatgtccgcgccttttacaagcggctcttcattgctcgtttttttcgtgaggtcgtcacggtaaagggtgatatcgatttccccgacggtgaccggattcccttcaatctgttcgatccgctcggccagccgcttcgctaaataaatgcctcttgttttaatccctacaagaatgcagtcattcattcctttattccgttcgatcatttcatgggctatccttgtcagcgcccgcctgatcgcctgttcgtcgagaataacagctttttgattcactcgtgacacctctccattcgtatataagaagaaaaaacccctctgccagagcatagaggggttcctttccaggacgaagacacacacgtgtatctcttctgtcctatccgttatccttctcagcctctctggactgtgttaaagaatctattcagcttgtttttattatttcagaaaagaaagtcgctgtcaatggctatttcttaaatcttcaatgagttttttcatatcttcaggaaggggcgcttcaaactccatgtattcgcccgtccgcggatgatcaaaacctaatattccggcatgaagagcctgaccattgaaatcaatggtttttctcggtccgtacttcgggtcgcctgccaaaggaaacccgatatatttcatatgaacacggatctgatgcgttcttccggtctcaagacggcactctacgagcgtgaaatcttgaaaacgctcaagcacgtggaaatgcgtgacggcgtttttgctgctttctcttgttacggtcatgctttgacggtcttttttatctctaccgatcggagcgtcaatcgttccgtcatcatgtgaaatcaccccgtggacaaccgctttgtactttctggtcacggttttattgacgagctgattaacgagtgattcatgcgccatatcgtttttagcgaccattaacagaccggaagtatctttatcaatccggtggacgattcccgggcgcatgacgccgttaatgccggaaaggtcgttgcagtgagccatcagtccgtttacaagcgtccctgtcacatggccgggcgccgggtgtacaaccatgccccgcggtttgttcacaaccaagacgtcctgatcctcatagtaaatgtccaaatccatcggctctgcaagcacgtccaattcttccggttcaggaatggtgacgtttacctgatcgccgggctgcattttgtagttcgcttttacggatttgccgttaacggataccaatccctcttttacccattgctgcacttgagtgcgtgaccagttttctcccgttgaagccaaaaatttatcaatccgttcgctcttttgttcaggctgaacggttatctcaaattgattcatgttattgctccttctttttcccgctgtcaaacagcatatgaataaataaaagtattacaccgacgcacagtgaggagtccgcgatattaaaaatcggatagtgataatccacgatgatgacatgaataaaatccaccacttcctggcgcgccgcccggtcaataaagtttccggccgcaccgcccagcattaagccgagagaaattccgagtaacatctgcccttttgcataacgctgtatgtaataaacgattccgataatcacggcgatggtaatgacgtagaaaaaccacatttggccggctaaaatcccccacgccgctcccgtgttgcgatgagatgtgatataaagcacctgatcgatgacaggtatgctttgtcccaattccatatggctgacgacaagccatttggtcaattggtcggcaataataataaaaagagcgataagataataaagcacacacgttcctccagtatacagttacttttatcctttatgaattttatcagtaaaagatgccagagtaaaggcagatcataagcgcatgcaaacagacgctgtcactcatacagcgcctgatcatatgcataatctccgggttcccaatatggaagggttttcttttcaaattgagcgggataataaaaatcatcagcggttctggccgtcggcagcaccgcaagtttttcaatcggaatgggggcgcctgttttttcacaataaccgtacgtattgttttcaaacttagacagggcaagaagaacgtcctgaagttcttcttttatatgatagatcagagttgcttcttggtcgttcattgaaggttgaacagatgctgacatttgaaagcaagaatattcgaataatcttgattgaagttcttctttcatcatgagaagctccgtgtggattgcggtcagttgatcattcattcatcacaactcctgctcttgatgttatggctttattgttgcccccagagcgtcatttgaagcccataagatttttcctgtcgttctaatcgatgacattagtggcatgtaaaaaagcgcccggctgacaccgggcgctttctcattcattatttttgataatatttttcaacgatttccgcattgcgcagtgatagtgtcggatatttcggattggctccgacatctttagaaattacgcgggaacgttcacacatctggccttccgctttttctacggtcatttttcctgttgtgaagctttgcgcgttttccggtgcttcactttcgtctcttactgtcagttctgagacgataaacagctgcgcgatattttctttaatggatgacaagaggtcgcggttttctttgttcggatacaaagtcaggctcgcttccaatgatcttccgataattttttcgttacgggctgtttccaaagctttcagcacgtcgtttcgaagctccatgaagcggtcgaacttttcttctgtcgcttgactgtccggaacagcaatggtttccggcatatctgtcagctgcacgcttgcttcttcaacaaatgataagtgagaccacatttcatctgccgtgtgcgggagaatcggcgccgtcagcttcactaacgccagcagcgtttcatagaagacggtctgcatgctgcggcggtccggatgatccgcatgctcgatgtacacaacatcttttgcaaaatcaagatagaaggagctgagctcgatcgtacagaaattgtgaatgctgtgataaacaaccgcaaattcatattcatcgtacgcttttttcaccttatcgatcagcttattcagcttgatcagcatatattgatccacttcgcggagatcttttacatcaacggcattgacgcttggattgaaatcgaacaggttgccatgaaggaagcggaacgtgttgcggactttccggtatacttccgcgacctgcttcagaatatcttcagaaaccgggtgatcggcctgatagtttacggaagatacccataaacgcagaatttcagctccaagctgttttgcgatttttgtcgggtcaatcgtattgccgagtgatttactcattttacggccgtttgcatcaagtgtaaatccgtggcttaatacgcctttatacggtgctttgccggtgactgcaacagcggtggaaagagatgagttaaaccagccgcggtattggtcagagccttcaaggtataaatcagccggacggacaagatcatcacgttcttcaagaacagcctgatgggaagaacctgaatcaaaccacacatccataatgtcttgctctttcgtgaagattccgttcgggcttcccggatgtgtaaatccttccggcagaaggtcttttgcctctctttcaaaccagacgtttgagccgtgctgtttgaacagctcagacacgtgttcaatcgtttcgtcagtgatgatcggctcaccgttttctgcataaaataccgggatcggaacgccccagacgcgctgtcttgagatacaccagtcaccgcggtcgcgcaccatgttgtaaaggcgctgttcgccccactccggcacccacttcgtttgtttgatggcatcaagcagatcggatctgaaatctttaattgacgcaaaccattgcgctgtcgctctgaagatggtcggttttttcgttctccagtcatgcggataggagtgtgtaataaactcgagtttcaagagcgcgccgttttcttcaagcttctccgtgatcggtttattggctttatcgtaaaacattccttcaaagcccggcgcttcgtcggtcatgtttcctttttcatcaacagggcacagtacttctaagccgtacttttggccgacgataaagtcatcttccccgtggcccggggcagtatgaacacagcctgttccggcatcggttgtgacgtggtcaccgagcatgacgagtgaatctctgccgtacagcggatgttctgcagtgatgtattctaattctctgcctttatatgatgcgacaacttcgggattttcaaagccgcatgcctccactacgttttcgatcagttcagctgccactacataacgcttgtctccaaccttgatgacattgtattcaagatcaggatgaacggaaattccgaggttggcaggcatcgtccacggcgtcgtcgtccagatgatgaagctttctccgttttccagaacgcctttaccgtctttcaccttaaacgcaacataaatagacgcggaacgtttgtcctgatattcaatttccgcttctgctaaggcagattcactggaaggcgaccagttgaccggcttcagacctttataaatatagcctcttttcgccatctcgccgaaaacgcggatctgctgcgcttcaaattcaggctgaagcgtaacatacgggttttcccaatcgcctctgacgccgagacgcttgaattgttcgcgctgtctttcgatctgctgccatgcataatcttcgcaaagcttgcggaaatcagcgacggacatttctttccggtttacttttttgtttttcgtcagcgccgtttcaatcggcagtccgtgcgtatcccagcccggcacgtacggtgcgttgtagccgctcattgatttatagcggacgatgaagtctttcaggattttgttcagggcatggcccatgtggatgtctccgtttgcataaggaggtccgtcatgcagcacgaatttcgggcggtctttcgtccgttcttgaacaagacggtaaatgtcctgctcctcccagtctttttgcatgtccggctcacgatttggcagatttccgcgcatcggaaaatctgttttcggcattaacagcgtatctttgtaatccattctcattcctccacaacatttttcagaaaataaaaaaagccctctcatcccataagggacgagaaagcttatctcgcggtaccacccttttagaaaaaacggatcatccgtcttttcctctcgaacatcgtaacgtgatggaacgtcctttcctactctcggttcagaaaggaaactaaagggctgatctgcatgattccggccatcccgggctttcaccttccccgggtcgctttatagcctgttttgagtcatgccggtccctttcaatcgtcttttcatctgaatttatgaacgtattatattcgaacgggccggagaatgtcaagaaaatcagaaaattattctttttcctcaaataccgcgtcgacttcgtattccagcagatgatcccaatcatcgttcttcagcagatcgagctgcgcttcaatcagcatttggaaacgtgttctgaagactttagactgttttttcagctcttcgatttccattgcgatttttcttgatttggaaagcgactcattgatgatgcgatcagcatttttttctgcttcacggacgatcagcttcgcttctttctgcgagttgcgctttacgtcttctgcggcttcctgggctacgagaattgatttattcagcgtttcttcgatattggcaaagtggccgattttttcgtccagctcgttcactttcgcctcaagctccgtttttttacggagtgcgatttcgtaatcttttctgacctgcattaaaaattcatttacttcatcttcatcatatccgcgaaaaccttttgtaaacgttttgttatggatatcattcggcgttaatggcatattgccacctccatttttacatttcagtacggttatctagttcacattataaaacaaatacggcacagatggagaaaaaaactgaaaaaacgactcatttttgccgttcaaatgtaactttccatttgtcttttttcgtttttccgtcaacttttgccaaactgcatcgtccgaagccgcgaatcgagagcatgtccccttcagcaacctgataagacggatcttcaatggctttccaattcaccttaacgagcccgtttttcacatgcgcctgcgctttctgccgggattgcctgctcattgaagcgcagacggcgtcgagacgcaatgaagaaaccgtgtcatcccttatttcgacatctgaagcggggatgtgaagagcggaaagctcgattttctcaagctttaccggcgctttgcccgccttggtcagctgagcgctgacaaaatcggcgatttcaccggagacgatcagctgcacggcttcctctgagaaaatcagatcgccgtatttctgccgctttaagccgatccccattaatgatccgagaagagagcggtggtcaatgctgacgaatttttcagcgtattgaacgtcaaaagcccgaagctcaaaatcatcctgttcaggttccatatattcagggtataaaatcgcgcgtttgcgctcagctctgtcatatcctccgaaaaacgcaagaccgcaggcgtcgccgataacggcttttacaatgacctgttctctgggatctaagaaatcagtcagcttcatccgatactggtccaggacaatctgtttccattcaagcgcctgatcaataaaaggccgctcgtcttgtctgaagtgctggtaaatatcgctcatgttctttcctttctatgtaaagaggcttggctggtgccaagcccatatcaaactgtcgcattcaagtatacattgcgatcatgcggtataggccccaaagtcccgtcgtggcaaaccgaagcacgataatcgctacaatcggggatatatccagcatggcaatgggcggaatgatccttctgaacggctctaaatacggttcgcaaatcgctgcgagaaaccgtccgaccgccgtttctctcgtactcggcacccatgacataaagatatagatgatcagggcaaacgagtagatgtaaattaaataactcagaacggaaaaaatttgataaagaatcatcctgctttaccacctctgatgttcgtcttcatttataagctccgaaatcgtgccggaaacgtcgacattatcaggcgtgcacagaaaaatatctgaaccgattctctgaatgtcgccgccgatggcgtagacggtaccgcttaaaaagtcgacgattcttttcgcctgatcatgctggatgcgctgcagattgacgacaaccgcccgcctgttctttaaatgatcggcgatttcctgcgcttccgcatatacacgcggttcactcaacaccactttagaggatttctgaacactttgcaagcttactacgttctgcttgccctgcggcttctgagcgtaagcaggctgtttatctttctgctgttcatgctcttccggatgatcctgctccgtttcaatgtattcgtactcgtactcctcctcatccattgagaaaaagtttttcagtttatttttcatgctcatttgtttacaccccccggttcatttccgactaatgaagagccgattctgataaaagttgcgccctcttcaacagcgatttcataatcatttgacatgcccattgacagttcccggcacggtgcgtttgtctgatgcagtttttgcacctgatcccccagatcacgcaattgccggaagcaggctctgatcgtttctgtatcgtctgtcaggggagccatcgtcatcaggccctctacagaaatgtttctaaactcagaaagctctctgataaaggggatgacctcctctgtttttaaaccgtgcttagacggctcaagcgaagtattcacctgcacaaaacagcgaaccgcatgctgcgcccgtttttcaatctcttttgccaatgacagtctgtctaaggaatgaatataagatacacggtcaacgacggccttcacctttctggactgaagactgccgataaagtgccactccgggctgcctttgatgacttcctgcttatggataagctcggcatcccggttttctcccagacttgtaataccggcatcaacggcctcttgagccctttcggctgatacgtattttgtaaccgcgatgacggtaacatcttcggggcttcggcccgatctgttacatgcttcgtttattctttcgtttatatgtcgtaattgatcagcaacacgcaagatcttacgcctccttcattccgataaaggacatcatgcgtcccgttttccctttgtcgcggcggtgtgaaaagaatagttcacgctctcgttcggtgcataaaccgctgactgaaatgttttcttccggaatgccgcaatgtatcagaagaagacggttgacctcttttaaatcaagctgatactggcctttttccgtttcgcatatggcggattcagccgtaaaaggcagcgcccgcacttcattgatgacgcggtcgtcgactgtatagcttcccgcgctgatggacggaccgatgacagcctgaatatctgttaaacgggagccttcttcgtttacccagcgttccgtcatgatgcgtccgatttgtttgaccgtccccttccatccggcatgggcagcgccgataatggatttcaccgggtcataaaaatacaagggcacacagtccgcaaaacaaagggccaaaaaaagattcgcatctttcgtgtagagcccgtccgtcccgcggaatgcggaagaatagtctctcgctccttttcctttatccccggctgtcacgcgccggacgcggttttcatgtgtctggtcggcgaacacccaggaatccagatcagtaccgcataaggacgctatgacttcacggtttgtcacaacatcatgagcttcgtcccggacgtgcaatccggtatttaatgactcatacggaggattgctgacaccgccgtttttcgttgtgaatccggcgatgacctttgtgttaagctgattcacacagttccagtcttctatcatgagtgccgagggggtggtaagactaaacgggtgatatgtattcatggagatccaacctttcgacaaacattaaaaaagcgtaatttcccactcattttaacacaattttaagcatacgtttagcggctgattgaaaaatgagataaataaatgtgccggaaacattgagatttccggctttttacaagtaaagggaggattacgctcccccctttggttcgtttacacgcactaagatgacatcttccccaattttaactatatttcgccaaggaatgatcatttcctcttcttttccgaaaaaaccgagaacttttccgctgccgcctaaaataatcgcctgaatttttcccgttgtcacgttaatatcaatatcaccgatgcttccgagtttttttccgttcgacacgtttaccacatcttttatttgaaattcagatatgctgatcatccgtatcacgccctttgcccgttctttttcctattatatgaacggccgggctgaaccttgtcacatcgggcaatcttttttgcggctgcaccaggcgaggataaatctcagcataattttcgtatagtccataagctcatcaacggacacttcctcgtttacggagtgggcgttttttaaatcgccgggaccgtatatgacgctcggaatcccggcatgataaagccaccctccgtcagttacggtttgggaaacatcaatgacgggctcctgttttctgacggctgagtgtgatgcagccaagacagaaactgccggatgatccgggtcgatttccagcgccgggaacacctctcctctgtcttcaatcatcgaagatccgccccatttgaacaccggcctgttttctttgagccacagatcactgtcagcgacacgattaatatagtcttcgatttctgcggctgcttgttcgtgcgtttcgttcggataaaagtggacggtgatccataaccggcattcatcggcgacaaacgctgcgtgtcttccgccttcaatgacggcggggttgatcgtattggtgccgggcgcaaaaccgggatagcttttcgttaccgcccagtggcgctccagctctcccaaggcagtgatgattttcgccattttttcgatggcgctcgctccgaatgtgcctccgcccgcatgaatcatattgcgcctcatgccgtcatgaaatgtttgtttgcttttcaattctatccagccggtgatgactccgccctgcccttgaatatgcaggctgctcgtatccgcgacaacggcaaaatccgcgtgatagccgcgtttgcagcattccagcgtccccgcctcaccgacttcttctccgattacagactgtacaatgaggtcgcccggaagctcaatgccggcatcatggatcagcttcagagagaagagaacacacgccaaaccccctttcatatcagcggcgccccttccgatcagcatgccatcttttacgtgcggctgaaacgggtcagagtgccagtcttcgcccccggcttctgccacatcaatgtgtccgtttaaaatcaggctttgatgcctgcttgaatctgtcccttttaaaacaccgactacattcgggtcttccggatacacatcccacatatcgaccgagcagcccgtttcttttaaaaagccggccacccacttttgggcttctgccgtatttcttgctggcggggccggagtcggaaaggctatcaatctttcagcaatatgtatgaagtcgtgccgccgtttctccgcctggtgtaacagcatatcaatctgatgcattggaaatctcccctttggctgtatcaaaaaaaccgtttcattcatgaaatgaaacgggtaaaaaacgggtcttcctccgcttttttcaccgcttccctccgccggcatgatccggatccggtcctttaagggttgagacaacgtctctctcagccgcatggcagcacccccagggtgaatttatgttattttacggatgatgcctcttttgcacgtgttaaaaacgggcggccattgttccataagacattgacaggcatatcgaaaaacgctgtaagccgctcgtcagaaagcatgtccctgattttcccggaggcgaacacctcgccctgttttaaaagcagcgcctgatcaaataccggcagaatttcttcagcgtgatgggtgacataaaggatggacggcgcattttctttttcggcgatcgacgtaatcgtgtccagcagctgctcccttgccataaaatcaagacccgtcacgggttcgtccagaatcagcagttccggatcagccataagcgcccgcgcaatcagcgctctctgtctttccccttgtgataatgtttcataccgtctgtcggcgtaaccgatggcgcccaaatccttcagaagaccgatcgctttttcccttacctgctcactcggagtttcgtacagcccgattgaggcgtacgcgccgctgagggcgatttcaaaagcggagtccgcggcatataatttgtgctgaagacctgccgaaacaaggccgattttccttctgagcctgtcaccgagctctgttttgccgaattgatggccgagcacctgcatctctcctgaagtggggaagtaataagagcataacatattcagcaaagccgtttttccggctccgtttaatccgtacagcacccaattttcgtttttctcgacgcgccagttgatatctttcaaaatccatttcccgtttctttttaatgacacactgtccagctgtaaaatcattgcagtttcccccgtttactttgtttaaattttctaaaaacttttacacattagaatacatcacttttttgcaaacgtaaaccatcgcatgaaaaaagcctttaaacaaggtttaaaggctttttccgttattgatggatattcttattcatttgtttaatggctgccttttcaagccttgagacctgagcttgggatatgccgatttcttcagcgacttccatttgggttttcccttggaaaaagcgctttcgcaaaatcattttttcccgttcgttcagtcttctcatgccttctttcagagccagctcctcaatccattgtgtatccttattgcgctcatcgctgatctggtccatcacgtaaatcggatcgccgccgtcattataaatcggctcaaacagtgaaaccggatcctggatggcgtcaagggcaaacacaatttcttcatggggcacttcaagaactttggcgatttcctctgctgtcggctccctgcttgtctcactgattaaccgctctcttacttgaagcgctttatatgcgatatcgcgaagcgacctcgagacgcggatcggattgttatcccgcaaatatctgcggatttctccgatgatcatcggtacagcgtatgttgaaaacttaacattatggcttaggtcaaaattatcaatggatttcattagtccgatgcagccgacctgaaataagtcatcaacatactctcctctgttgttaaacctctgaatgacgcttaagacaaggcgcagattgccgtttacaagcttttccctcgctgaatcatcgccctcatcctgtaattgcctaaacagctttctcatctcttcattcttgagcaccggtaatttggaggtatccaccccgcaaatttcgactttatttcttgacacgtttttccctcccactaggagctgctgtacaacgttaagtatctcctcgggtgggaaaaatatgcaccgccattttacagaaataaacatccggcgacggcaatccttgcggcagtaagggctgtcagatggaaaaaattttacaccattttgttaaactcttttctcagtcttttgataatccgcttttcgagccgggagatataagattgtgaaatccccatcatgtcggctacatctttttgagttttttcttcttctccgacaagcccgaaacgcagttccataatctgcttttctctttcgtttaattgctcaagcgcttttttcaaaagttttttatccacattggcttcaatgtcttttgtaataatatcatcatctgtgccgagcacatccgaaagcagcagctcgtttccgtcccaatcaatattcagcggttcatcaaaggacacctctgaacggattttattgtttcggcgcaagtacattaaaatttcgttttcgatacatcgcgacgcgtaggtggcgagtttgattttcttttccggattaaaagtgtttaccgctttgatcaaaccgatggtgccgatgctgattaagtcctcgatgttgatgccggtattttcgaatttgcgggcaatgtaaacgacaagacgtaagtttctctcaatcaggatggcccgcgccgcctgatccccgctcggcagctttaataagagcacctgctcctcttctttagacaaaggcggcggcagcgcctcgcttcctcctatgtaatacacttcatcgcttttcagtccgagtttcatcagccatttataccacaaatatgtcagacgcagcttaagttttttcatcttcctcccccttctaaatacaacgcgttttgagtatgatgaataacagacttttcgtcaggaaacatgttttacagccttccctgtcagcatcttcggatgaacgattccgtcaaattcaccgtccgcggataatggtttcgtgctgatgccgatcaggcatttttcacaagcgatcatttcgtcttttgttaaaatcgtgacgtaatccggctttaaacagagtaaaaattgattgtcctggccgacgcccctgtatggaatcagcctcagcttatccgcatggcggaacgaatcatcaagctgctctatcacttcaagcaggctggcggatttgatgaggtccgtttccttttcgctgagaatcagagcgaatttgtcaatgtgaaggatcatgaccggcgttttcgtcagcggatcatacagctgattcccggaatccaccaatcctttcgcgcggattgtctgtccgctgaattccgcctgcaccatgacaagttcatcgtactgaatggacttcgtctcgatgtcttcaattctctttttcgagaaaaaccatatggccggaaatccgataactacaaacatccagctgatcgggtcgccgaatccggtctggcttgtgaccattaccccttgctgcacaattgattctgtctgcagcagggaatgtacgccgatcattcccccgccgacgagaaaagtcgcgaaataaaaggcgaacaaattttgaaaaaagtatcggaaccgtttaaagccaaaagccgcaagcacgatgactactgaaaacgccatttttcccgccggatgctccacaaagggagaaacaggcgtaaacatcagaagcacaatggctgacccgatgaaaccgccggcggccactcttctttttttcacctggcgttttaaaataaaggcggtcaataaaagcaaaagagaatcaaaacaaaagttcaacagccaaatgacatccagatagattttcacatctgacccctttcctcttttgtcttacttatctgtttctctctcttgtttcataagtataaagcaagctctgtgggaaagtctgtcaattaatgttgagggtaaagtacaatttttaagggataaccgttttatttgtcgagggccgaaagggttgctttcctattgtccgtttcaactaaaaaagcgctgccgtgatctggcagcgctctgtttttactcattgatataaagttttcctttagccgtctgtctcgtttcatttccgtagtcatctcttgcgataacgtcaatttttgctccgcttgctttgatggaagaggtcgccgtccagtaaccctcatatcgtcccggagaaatttctctcagcggaagctctgttgcgttttggctcccagcccgggcgtttgtcagaggcagacggataacgaaggaagcgtctaatttctttccgcttgaaaaagcgattttcactgattctccggcttttaattccttatccgctccgggaaccaatccggaaatgacgggagcattgtaattgacatcgattaccgtctttttcgttgttttgttacccgcttcatctgaggccgtgaccttgatctcattgctgccgttttccagaagggttctcgcttgataagaaccgttatttacttcagctttttttccgttcacctttacccattctaaatgggcgtcgtgcacttttccttttacggtcactgcttctttatttgttttatcaccgtttgccggactgtcaatcgtcacatccggcttatcctcatccagtatgaccgtgacagggcgtgactcatcggttgacccgctgtctgtcacagatgccgccgtcagccgattggcatcttcagtgagtgtgacgccggcctggaaattgccgtctgcatctgctttcgtttctgcggcggttttaccgttattggtaagacggacagcggtttttggtgaagccgttcctttcaccgtgattgacctcttgtttgtaaatgaccggtcttcaggcgacgttatgtcaggcacagaagcttcgtagtcgaccaaagccctgatcataaagtttccgtctgatttatcggttttagaccagcggccgtcgaggtattgccagtttctgttcgagtacggactgccgtcatcagatgacagggcaggtgtataaggatcgggtttcgtctggcggaacacaagataaaaatcctttccgaccgcgattccttttgagctgagatccactttggtccattcgccgtttcgaagcgcttcagcttggaacgggccggcaattttgctgcccggagctccatcagggccggatgcatcatatacttctgcttggaattcggtaccgcccggatcaggccagtcggcgccccaaaatttaaaaaggcctcccgtcagcataccgtgttcttttccgtctttaagcgtcatctttacggcagatttgctgccggctttaaaatatgacagcgcggcttcttccgctccgttatcataggcaatttccccttcataaccgatatacggcttaagcttgacgtttttttcagcatctcctttgatgtcaacggaaaattcgctattgtaaaagccttttgccgctactttgattgtgtaggagccttcgtacgccttaagcgaatattcccctttatcgtttgtcaccgccggttcaattgcggcatcctcagccacataaagcgcagccccttttaccggttcgcctgttgactgattggtgatggttccttttagcgtgccggacggcatttgctccagtgtaaagtctgcctgtgcggttttgtctgattgaatagaaacttgtttcgaagcggacttaaatccgtaagcctcggctttcagcgtatagcttcccgccttatgcgacaggctgtagcttccgctaacagggtcggaatatacggatttccccgtctcggcgacactgatttgcgctctgagagggaggaggtttgtttcacgttttactctttttccgggtgatttcactgccggtttggcctgtttcggactgactgcttttttcttcaggtggccgggaggtgtttgtctattgtgtttactttttttagccgccttgccgagagggctgcttgaaagccggacatcatcgatataccatccgtcttcattgagtacttcgtctgactgcatattaaacatgagctttatgttttggcctttatacgcagataaatctgcctcttcatcgttccatcctgcggagtcaccattgtaaacggccgcctgctcccaatttgattttccttccggaagaacgaacacatacccgtaatcaaaaaattcttcgagcttgtgccagcttttaaattgcaaaaacagccgtcctgtttccggaacttgaatcggaggcatcaccaaattcatgttggctgaatcggcataagggccggacagattcgtcgcatacactttatctccggaaaatgcggcgccgggccctgaactcgggataccccattcccattggtcgtgtgtcccgtaactggaccagcccgccggctgtgattcaaaatcctctttgtatcccgccgtaatgctcggtttcacgtcagcccggtacgtatcagattctacagaatgacctccgaaatcttttatggtccatttataacttaccttgcttcccgttacatccggaatctccgcctggtatgttccctttttttcatcaccgcttttttgaacggcggctgtcgttttccactttccttcatcaaactgataggaaaggctgacttcagttacacttacatcgtcttctgctgtaaccgttaacggaaggtttgcccctttgtaagccgctgagaccggttcatggtgaaagctgggcggattgtgatcttcgcccgcagaagagaccttgccttctacgcctccgattccgtccgttacggcagaaacggcatcaaaagcgttaacgagaccgtggccgtaaccgttattcggtgattccggaaaaacggaatctgtcagcttttcggcggtgcgcgtcaaaacgtcttccatttcatcgaccgtaatagaggcgttcgcctgccttaacaaagccgccgtcgccgccacatgcggcccggccattgaagttccgtcccagccgccttcgtatgttcctccaggaatcgaagaacggatattcactcccggagccgaaatgtccggttttgtttcatgatacggtgaggggccttgaagtgagaaatcagcgagtttcttgtcgatgtcagtcgcacctgtcgcaaatgcttcaggataattggccgggtttgcgattgaacccggtcctcccggtgtaaataagtcttcatttcccgcagagaattccggaaaaatccctgccgctctccacgcattcaccatatcgcggtaccactcgtccattcccgaaccgcctgcccaggaattattgacaacatccggcgccatctcgggatgcggcgtgccgtttttatctttaggcgcgagcacccattcaccggcatccaaaatatcggcatcagttcctccgtcatctgaaaatgcttttactgcgatccattttgcccccggagccacaccgatttgatttgagccgtcaggttctgaacccgtcatggtccctgttacatgagtgccgtgttcaagatcatcgtagggagcgtctttatgggacacggcatcataccagttcatttcatgattcggcgctgcgggattttcaggatcgtaaccccggtatttttctttaagcgccggatgatcccactgaactcccgtatcaatggaagcgacaaccgtgccggttccgtcgtatcctgaagcccaggcctgcggcgcatcaatttggctgatattccattcgatgccttcctttgctttgatctctttttgttttttcttcatttgaaaaggagcttttgattgtcgttgagtaagctgacgtttttcattcggaagaactttttctacttcaggaaatgaggcggctttttccattacctctttcgaagcagtgactgccattccgttaacaatataataggaatggatgtgatcagccttgcctttctttttttgtttttccaaatatgttttcagattctgctgcgcatcatgagccgccagttttaaagaagaaacgacggctgaccgcttttgatattcggtttttgctgcggaaagcgattgagacttggcgtttttttctgcttctttgaccgcttttttcgtattggctttctctttaaatttgataagaaacgtgactttatcatttttttcaaaacgcttcttgactgaatcggaaatcttatgctgaatgctcttagaggaagaaagatctttggtgaaagaaactgcccccggtgtgctgttcgctccggctgcacccggaaacaacagggaactgacgacaatcgcgcttaaaacggagcctgtccatctgtttcttgtttttttcttcaatcgtatccccccttatttggtaacgccctataaaatgtgtatccctccttcataattggaatcgtttgtcatttcgatgctgtacgttaaatgtagacaatcttccatccagatattgtcgcattctgtagaaagccgtatgaaactaaaaaacaatcaattcgtcataggtataaagtttcttttttcactgtatagatcatggggataggaaggaagactgtacacaaaaaagaaaaaggacaaaaccatgtggtcttgtccttttttacatcagccgcgtttgttgcggtttcttaaaaatgtaggaatgtcgagggcatcatccgccggctgtgatgtatggcggttcaccgtgttttgatgctgtgtttcttctcgtttcggctcacgtttcgcagcgttttggctttgagacttcaatccttggtttaaagtcggacgctgcggttttgagtcatctttttcctgttcgataaaaccggtcgcaataacggtgacgacgatttcatctttcagattttcattgataactgaaccgaaaatcatgttgacatcagggtcggatgcagaagcgacgatgtcggctgcttcctgcacttcgtagaggctcaggtttgtacctcccgtaatgttcatcaaaacaccttgcgctccgtcgattgccgcttccagtaacggactggagatcgcctttttggcggcttcagcagcacggctttcgcccgtagcgatcccgatacccatcaatgctgaacctttgttggacatgatggttttgacatcggcaaagtccaagttgattaaaccaggcgtcgcgatgaggtcagagataccttgcaccccttggcgaagcacgttatcagcttcacggaatgcttcaagcatcggtgtgtttttatcgacgatttcaagaatgcggtcattcggaataacgatcagtgtgtcaacggcttctttcattgccgtgataccgcctgcagcctgcagctgacgttttcttccttcaaatgtaaacggtcttgttacgacaccgacagtcaaagcgcctaagtcctttgcgatttgcgcgataaccggtgcggctcccgttccggtaccgcctcccattccggctgtaacgaacaccatgtcagcaccttttagcgcttcttcgatttgttccttactttcttcagcggcttttttgccgacttccggattcgctcccgctccgagaccgcgggtcagcttttccccgatctgcattttcacttccgcttttgacaggttaagagcttgcgcgtccgtgtttaccgcaatgtactctacaccctgcacttcattttcaatcattcggttgaccgcgttattaccgccgcctcctactccgattactttaattgatgctaagccgtctatgtttgtttcgaaatccaacatgctaaatcctcctaatctgccgaatgactatcaatctattcccaaaacatgcttaatagttttttcattttgctcggtttgttgtgttcggcttgtgttttttgttttgcttttggacgctgctgcgcctctggccgctgatgatgttcttcttcgtgagagaccgcgatttcctgcacggcttcttccggcatatgaaagcctatttttcttccctgaattctggcatttcggcaggcaaattgtatcaagccgacacccgtcatatactgagggtcccttacaccgatataattcgggcttgcgacccttacattgtgcctcagcacttcctgtgccaatgaaagcactccgggcattgcggcctgtccgccggtcagcacaaagccgccgggcagatctgtaattcccatatgctcaatttcggctgcggcaatctcaagaatctcttccactcttgcttcaataatattggcaatttcctgctgtgtaaaagattgcttttgattcgttcctatgacggtgacttcaaatacttcatcttctgaagcctcatcgtagaatgcatgtccgaattgtttttttactctttcagcctcttcggtggaagtgcgcaatccgatcgatacatctttcgtgatgttttcgcctccgagcggaatgacggctgtctccttcaggtgcccctgttcaaataccgccaccgtcgtcgagccgccgccgatatcaatcatggcgactccgaggtttttttcgtcttttgacaaagccgccgaaccggccgcaagcggctgcaggcaaatatcagtaatttcaacgcccgctctctccacacagcgaagtaaattatgtaagatcgttttggagccggtaatcagcgtgccttctacttccaggcgcacgccgagcatttttttcggatcggtaatttcgtctcttccgtcaacaataaactgtttcggaacgacgtctacgatcagctgctcatgcggaactgacacgacctgtgccgcttccattaccctgcggacgtcttcaacgtgaatttctttgttttcactggaaacagcgacaacgccgttcgtatcttgaatatgaatataatttccattaacgccgacaatggcttttttcagcggaaaacctaccattctttcagcttggtcaaacgcttttcttatagaatgaacggtttcatctatatcaacgattgagccttttttcaacccttcagacggtacatttcccactccgataatgttaagggaatcatctgtcatttctccgacgatcacttttgtattggacgtaccgatgtcaagactgacgtaaagttcattgttgttcattctatggcacctcctcacatttcgatcaaattctattctattatttgcggaacaacaatacaatgaatgtggctttacaagtgtgtaacaaaaacaacagcatcaacaaattcttatctgatttctcacaatttatgtttaatgaaactattcgttatattctatgtatatcctcttttatatcgtattttttttattttttttagagacggcccaccttaccgtaagatttcctttcacggtgccatactgtgcaaaccagatgcaaatatacccgctttccattagtctacactaagatgaacctccagaaaagctatagatattgccagaaacatccgaaaaaagaagaaacaggaggaaaattccaaatgcaatgctcattgcagaagacacgcccattgcattgagaattttccgcttgtccggcagccatatcccgggcaaaaacaaacatagtcataatgattccgctatcggttatatcggctgccccgctgattgtaatagattcttttgaatcaccttgaaattagttctttagaactattaatcattttcttttttcttgccggatttacctttgttaaattcttcaaaatacgtagcgacttctaagtggataatcccctttttcccgccgtccagctgggaaacgatagatggataggtcttcatccggccggcaaacgttttaatagaagcggtaactacatacccgtcgttcatatacagcttgatccggtcctgatccatttttaccggtgtataatagatttcagaaatcgactgcttaagcgaaccggaaagcttatcaagctgctccgccattttgacccgctttttcgcgtttgtccagtcaaccaaaatcgggcccgcgtcatccggcgtgacttcgttcggcagcacagtgccgttttcgagcacttcataatatacatcatgtcgctgcagatacgcgatcgtcttgtattcttcaatgtgaatgctgactttgttaggaaatacttttgaaagttccgcctttttcaccagcttattctgctcaatcttttcttctgtttgtttcttgttcagactccagaactcggtttgtccgttatgtatatcagaaagcgcgttgatctcttttacagacacgttttcgtttccggaaacggtgacagaagacactttgctgatcggcatctgcaagtacacgatgatcagcaccatcataaaaaagagcacaatgaatgaaatcagccggcggtttgctttttgcttccgctgctctttgattttcggaatccgctcttcaatatttacaattttttctctttcatgatttgggttcactgcctgtccacctcactaagaatgaaacagcttgacattcgtctgattgaaaaacaaacggcatgctgtgatgccgtttgacatttgttaaaagtatatcacatgagctcacgtaatcagagaaccttttaacgattccctccgatgatttcaacttctgtatgcatgtcaacatcatactgctcacggattgtctttttcacatattcaatcaggtcgagaacgtccttggcagtcgctccgccggcattgacgataaaattcccgtgcatttcggacacttttgctccgccgatctgatgtccttttaatcccgctttttcaacgaggtttccggcatgatccggcagcggatttctgaatatgctcccggcgcatgggcttgaatacggctgagtgttttttctgtaatctttgttctgctgcatttgcgccgtaatggcttcccgttccttttgctcaagctgaagaactgcctcgagacagacgccggggcgttttttctgcaaaacagacgttctgtagctgaaatccatctcttcgtttgtcagccattcgattgtgccgtcttcaaataagatacgggctttcacaagaatctcactcatatcagatccgtgcgccccggcattcatatagacggctccgccgattgatccaggaatgcccgctgcaaattcgagaccggacattccttttttactcatggaagtcgcaagccggacgaccgaatagccgcctccgaccgtcacctgatcaccgtcaatctccaaatgatccagacccgctcccagcttgatgacaactcctcttatgccttcatcaagcacgagcagatttgaaccgcgtccgataaccgtccatggcagatcatgtttcttcacaatatccataatatctttgaccgcttccacacggttggggatgattaaaatgtccgccggaccgccgattttcatcgttgtatggttcgcgagcggttcttgttccagcactttgccgacttcgcggtctcttaattcctgaattacgttctccatcataaacctccgcattccatttgctctatttttttatgtcttccatgatactgtacagtctggctgccgcatccggaacaccgagtgattttgtccgctcactcatgtcttttaaggtttcttcattcatgacgattttgtccagcgcagcgatcagtttttctccgctgagctcggtttccttcagtacgattgcagcgtcatgctggctgagcgccttcgcattgacttcctggtgattggctgtcacatacgggctcggaataagcacgctcggaatgccgagagcggtgatttccgcaatcgtcgtcgctccggctctggccacaatgacatcaattgattgtaagtactccggcatttggtgcaaaaacggttttgtcaccatattatcagcggcttttccgcctttcagctcagccgttaccttctcgtaatgcacttccccggtaatataaagcacttggtaaggtctcgttttcaattcttcctgcatatctataacggcacggttaatgggagccgcgcctctgcttccgccgaaaatgagcaccgttttttgattgtctttcagcccgaactcagttaatgagcggcctgtcttaattgagacgacttcagaggctctcgggtttcccgtaaacacaactttttcagcaggaaaatgcgattttgcctcttcaaagcaaattgctaccttattaacatatttcgagagaaacttatttgtgatgccgggcaggctgttttgctcatgaatgatcgtcggaattcccatttttgccgccgcgtatacaaccggaccgcatacatagccgcctgtaccgataacggcatccggtttaaactcttttaaatatgatttgcttttcttcacgccttttaagaaacgcatgacggtttttacattttcaaaagaaagttttcgtttgaaacctgtaatttcaatggcgcggaacgggatattttcccgttcaacaatttttttctcaagaccgttctctgttccgatatacaaaaattccacatccggatgccggcgctgaacttctttaataaaggccagggccggataaatatgtcctccggttccgcctccgcttactgcaatacgcattcgtatgtcccccttaatcacatagcgataaccctgttttttaggacagggttattgatgttgtctgtttttttatagataacgaataaatcatgagtgatgaggcaagatacagatcaatacctcgagtaccggctgacatttaaaagcacgccgaccgctgcgagcatcagcgtcagtgatgagcctccgtagcttaaaaacggcagcgtaattcctgttaccgggatcagccccgtcacaacgccgatattaatcatgacttgaatagctatcatagaaataataccgatagcgacaaagcttccgtataaatccggcgcgccgagggcaattctgacgccccgccataataaaatagtgaacagcagcaatatgagcgaaccgccgataaagccgagttcctcagataaaatagcaaaaatgaaatcggtttgcggctccggcaggtaaaaaaacttttgccggctttggccgagccccatcccgaacagtccgcccggacctacggcatagagcgactgaatgatctgaaatccgcttccaagcggatcctcccacgggtttaagtaagaggtaatccgtttaatccgataaggagcggacagaactagtgccgcaaatccgcttaaaccgatgagtccgaggaacgcaaaatgagcgattcgcgcaccggaaacaaaaatcatcacgatgcacgtgcccaccattaccgtccccgttcccaggtctggctggcacataataataataaatgcagaaaacacgattccgagcgcgggaacgaatccgcgtctgaatgacgtaatattcttctgtttttcagaaagaaatttagccagaaacgcaatcatcgcgagtttcataaactccgaaggctgaatgctgaacgctcccactccgatccagcttcttgaaccgttccgcaccattccgactcccggaatcagcacaagcacaagcagaaaaaaacatatgatcagaagcagcttcgaccatgtgcgccatgtccaataatccacattcataatgaaaaacatggcaatgacgccgatccccgcaaacagcagctgccgtttcgcgaagaaaaacgagtcgtcaaatttataatccgcccataccgcacttgcactgtagaccataattaatcctattgttaaaagcaataacgtaatgataactaataacaaatcaggcgctgtttttttagtagtcaaagcaatcgacaccccaagcataagtcatttagggctgccgatgaacagagacaagcccttacttaagcatatgcacggcatctataaacatgtcaccgcgttcttcaaatgttttgaactgatcccagcttgcacacgcgggtgacaagaggatgacgtctccttcatttgagagcgcaaacgccgcagatactgcttgttcaacattatcgacacgtttgacatgttgtattcccagctcattgcccagtttttctatcttcggcgctgtctgtccgaacgtcaggaccgctttgacattgtccatatacggtttcaggtcgtcaaaaccgttgccgcggtccagtccgcctgcaagcagaataaccggtgctttgaacgccgagagcgctttgcttgtggccaaaatattcgtcgctttgctgtcattataaaatttgcgattctggatcgcagttacatactgcagacggtgtttgacaccggtaaagcttgtcagcaccttctgaatcgctttattagacgcgcccgccgtttttgccgcggctacagcggctaaaatattttctaaattgtgcgcgcccggcagtacgatgtcatcaacaggcagaatcgcttcatcgccgaacatcagcattccgtctttaatgaatgcgccgcttgacagttcctggtggactgaaaacggaacggtgccggcttttccgctttcggcaagccgcacgactgtttcatcgctttgattgacgatggccgtatcactctcaagctgatgaagatacacgttctgcttggctttttcatagttttcacggctgtgatggtaatccaaatgagcgtcgaacacatttaaaatcaggccgatttcaggtctgaacgcatgagtccccataagctggaacgaagaaagctctgtgacgatccattcatcaccgtcagcatgataagccacttcactggcgacagtgccgatattccctgcgatcagcgcctttatcgaatcagctttcagcatttcataaatcagggtcgtcgttgttgttttcccgtttgaacctgtaatgccgatgaattttgcattggtgatataatacgcaagctcgatttccgtccagaccgggatgcctcttctttgcgcttcctccaccatgatattttcatacgggattccgggatttttgatcagaatggtaatgtgatgctgatcaaaaagtgacgtcggatgctcaccgcagatgacttcaattcctctttctgcaagcctttgggcaggttcgttctcttcaaaggctttttgatcattcacgacgacgttaatgcctttttcatgaagaatcgacgcagccgcatatccgcttttcgccagtccgaggaccagaaagttttgtttttgcaaaaaaagttcgttttccacttataaccacacctcgatgtaaattcctaaaacggcaagcagcagtcccgcagcccagaatgtgacgacaactctccattcagaccatccgaccaattcgtaatggtggtgaagcggactcatcttaaagattcgttttcctgtcgttttaaagctgatgacttgtaagataacagataaggtctcaataacaaatactccgccgataatgacgagcagaatttcaagcttcgtcagaatggcaacggtcacgatcgctcctccgagcgcaagcgaaccggtatcccccataaataccttggcgggatgggcgttgaatacaagaaaaccgagaacggcgccgacaacggcaaccgagaaaatcgcaacgtcatattgtgactggttccacgcaaggatggcgaaagcgccgaatgcgatagccgcggtaccggacaagagaccgtccagaccgtctgtcaggttgacggcatttgaacctccgacaagcataaagagaacgaggataaagtatccccagccgagatcgattgacagatgtgtgcccggcaccctgatgccggttgaaaaatggcaataatgatatactccgtaaaatacaatggcaataatgatctggccgatcaatttctgcttcgacgtcaatccgagattccgtttcattactactttaatatagtcatccagaaagccgagcaggccgtatccgatcgtgacaaacagcagaagaaacatttccgcgctcagatgcgaaaatttctgcgtcatgacaatcgccgtaatggcgatggatacaataatcatgaccccgcccatcgtcggcgtccctgattttttcatatgtgatttcggcccctcttccctgatactttggccgaattttaaacgtcttaaaaacgggataagaatcggagatatcagaacactgattaaaaatcccattattattgtaaataaaatcacttgctcaagcattgctcttttctcctcccgtttcgttcaaacgacatacgtatttatcatattcacattgtgtccccgtaattcttttcatttccctcattctaacactctttcctgttttactttttattcagctcaacaatagctcttcccgctacttcggcgtcatcaaagtcgaatgtttcattgccgatctgctgataggtttcatgccctttcccggcaatcagaaccacatctccctttttcgcgttggcaatggcaaaaaagatagcctgctcgcggtttgcgatactgtgatagtaagtgccttctacccctctttccatatctcttaatatggccagcgggtcctcgcttctcgggttatctgaagtgaaaatcggttcgtcggcaatccgcaccgcaatttccgccattttcgggcgtttcgttttgtcccggtcaccgccgcagccgacgacgacgaaaagcttgccctctgtcatgtctttgcatgtattcaggacgttttccagactgtcaggcgtgtgcgcgtaatcgacgactacaggaaacggctgattatgatttaccagttcaaaccggcctctgacaccttgcagctcttcaagagcgcttgtgatcgtatcaaacggcagacccgctgcgatcgctgtcgccgctgcagccagtacgttatacacgttgaagcggccgacgagtgaaactgtgatctgctttgttccttttggcgtaacaagttcaaagcttgtgccttgcgcagagatctcgatttgtttcgccatgacatcggcatcattctcgattccgtatgtaaggatgtgcgccgccgtcactttttcaaaataagcactggctttgtcatctgcgtttaaaacggcccgcttcggcttttcgtggttaaaggagccgcccagctgggaaaacaggaggcttttagcctgtctgtagtcttccatcgtcttgtgataatctaaatggtcctgcgtcaggttcgtgaatacggcgatatcataatcgcagccgtgaaccctgccgagtgacagagcgtgagaagacacttccataatagctgtgtcaacatgctcatcattcattttcttgaacgttttttgcagtgtgacgctttcgggcgttgtatttttgaccgggaatgtctcatccccgattttaatgtacatcgttccgattaaaccggtctgtcttcccgcttttttgaaaatctcatcaaccatgtgcgtcgttgatgttttgccgtttgtgccggtgatgccgataagctgaagctgctttgtcggctgcccgtaaaacgcgtcagaaagaacgctgagcgcccgctgtgaccggcggacaataatgacaggaacatcgacgtcaagctctttctcggcaacgatggccgctgcgccgttttctgcagctttttgggcaaaatcatgtccgtctaccgtatacccttttatacacacaaaaagactcccttttctcacttccctggagtccatctcaattgaagttatgtcagggtcatgaaagtcattttgaacaggttcggccattaaatatgtaagcagctttgtaagtttcattgtatcaaacctctcagaaattctattcattcttttatcatgataaccgtttataaaagtcagaatggcttttaaacatacagttcatattttagcgtaaataaaaggatacatccagttaatcttaaaagttatcttctttttttctctttatgataagaggcagccgaaaacaatcggctgcctcaaaaagactcattcttcactcaagtaaacacggatctttgagccttcttttactttcgttccggctgcaggtgattgtttcacaattttgcttccttttcctgaggagtcaatattcaaattgacaagcagcgactcaagatcagagacagacatccctacaacattcggaacctctattgtttttgtgtcgttccattgatattttttctcgatttgattttttcgcggtttcacgccgagctcaggcagactgtctctcatcatatttccgacaatcggcgcggcgacggttcccccgaattgaatcgtgcctttcggattatcaaccgcgacatacacgacaaggctcgggtcatcagccggcgcaaaaccgataaaggagacgatatggttgttttcgagatatttgccgtctttgaccttttgtgcggtacctgtttttccgccgacgcgatatccttccacaaaggcattccgccccgttccctgagcgacgacgctttctaaagcatatctgatctgctttgacgtttcctgggaaataacttgccttttcgcaatcggcgattgtttcttaacggtttttttcgtaacgggatcaacccactctttggcgataaatggagtataaagcgttccgccgtttattgctgcggaaacggctgccacctgctgaatcggcgtgacggaaaccccttgtccgaaagcggttgtcgcctgttcgaccgggccgactctgtcaagcgggaataagatccccgttccttccccttgcagatcaatgcctgttttctttccaaagccgaagtccttaatatattgaaacagcttttgttttccgagccgttcccccagctgtacaaacccggggttgcaggaattttgaacgacttcaagataagattgcgaaccgtggccgccctttttccagcatcggaggcgggcgccgtcgacctcggcaaatcctttgtcataaaagtggtctctttgcaagtttactttttgctcttgaagagccgccgcaagcgtaataatcttaaaggtcgaacccggttcatatgtgctccataccggcaggttccggttgtaaacagacggatccaccgattgatagtcagccggatcaaaatcaggacggcttgacatgccgagcacttccccgtttttcggattcattgcgaccgcaatcattccgtccgggttatatttcgccgctgcattgtcgagctctctttctataatcgtctgaaccttggcgtcaatcgtcagtttcatatcaagtccgtctttcggaggggtgtaatcatccgcttcatcaggcattttcttccccttggcatccgtataaaatttcacggatccctttacaccttttaagtcatcatcataataagcctccaatccgagaaggccctggttatcaataccggcaaaaccgagaacatgggacaaaaagcttccgtacggataatggcggatgctgtcttcagccacataaaccccttttaagtcgagcgctttgatttctttcgcttttttattggaaattttccgcccctcgggtgagattttttctatggaggttttcttagtaatgtgtttgtagaccttctcttccgacatatttaaaactgacgcgagaagcttgcccgtttttatgggattttggatctggcgcggtacgacaaagacggtcggcgcgcttttattagtagccagcttcacgccgtttcggtcaagaatctctccccgctcaggctcaaacggcaaatttcggctccaggaatccttagccagtgaagtcagcttttctcccatcacgaattggacatagcctaatctgctgtcaatgatcaaaaaaatgattacgccaaaaagcaaaaccagtaataaacgttttcgaaccgttacatttgaaacgcgcaagggaccgtccactccttatttaggcttgtttcaatttatgcctcagcttggacacatagaacggcggcgcataaaaaagaagcccgcgggcatccgcggacttctctgtcccgttaatcaggatttttaaatttcaccttgatcacggtattttctttcagttctttgccttttttcacactttggcttgaagcgtaaccttcaccgctcacatcgatgtgaatgcctgatactttgctgaattgaagcacttcccgtctcgaccatccggacatatccggcatcgtcatctttccgtctgtttttaagaagattttctgattggtgatcagatcttctccggctgtcggatactgctcttttacggcaacatcgctgccgatgacaatcggtgtgagatgttcatttttcgcttccttctcagcgctcttgaccgtcttatctgtcaggtcaggcatcttttggcttttcgtttcttcctgaccggaatctgttttttccgtcggttcgatattcatgtagtgaaggctgtttttcatcgtcgggttaaagatttccgcgacaggatcagagctgctttgccccgcttttaattgcggctgctgcacggctacatagatgacgagcttaggatcatttttcggcgccatgcccatgaatgaaaacacatagttgctcgttcctcttaaatatccgcccgtcccggcaatttgtgcggttcccgttttacccgcgacgtcaaatccttcaattttataaggttttcccgttccgatgtctgacgtcacgacttctccgagcagattccggacttttttcgccgtatcggctgaaatcggcgtgcctgcttgctctggttttgtctgcttgacgacttttttcgtatcggggtcgacaatatgatcaatgacgtaaggtttcatcattttgccgttattggcaatcgccgtgacggcctgaagctgctggatcggcgttatcgccgatgcttggccgtaagccgtagacgctttgtcaaaatcatatttgtagttaattttacttgatacttcaccgggcagatcaacccctgttttttgatagagcccgaatttgtgcaggtactcattaaaccggtcaaaccccagtttttcgttggccagtttggcaaaagcaacattggatgacctcataaggccgtcatggaagcttgtcatgccccagccggcgccatcgttccaatctttaacaggtccgcctcccactttatatgttcctgatttatatttctcgtttgcggaaaacacattttcctgaatcgccgcagcaagcgtaaagatcttcatcgttgaacccggttcatacgcgtacgacactaagtcgttgtaataattggtgacgtttctgatattcgggtcaaaactcggacgctgccccatcgcaagcactttgcctgttttcggttctacgacagccgccataatttttttcggtttatatttttccgctactttcgtcatgctgtcttctaaaaaggtttgaattttctgatcaatggttaaatatacattgtcaccgtttttaggtgcggtgattttttctttgctgttcggaagtttccagccggatttatcactttcgtaagtgacggatccgtcgcgttccgtcagatagttgttcagtattttttcaagccctaaagagccttgtatctcgtttgttttttcattcacatcggcatagccgagaacatttgacaaaaatacaccgttcggatagtaacgcttcgtatctcttaagaaagaaatacccggaagattcattttttcgatcttttgttttttcgcataagagatatcgcggccggctgaaccgaattccacctgcttcgcgccatccctgtttaagatgtccagaatctcgcttttatcaagattgataacggtcgccagtttttccgccgttttctctttgtctttgacatgctgaggatgcttcttgtcggtcgtcatctttttatcaagcacggcaatgagcttatatgtcgccgtgtcctctgcaagcactttaccgttccggtcaagaatagagccgcggctcgcttctatcgtccgctttttttcgtgctgctcggtcgcttttgttgcaagttctacaccgtttgctttaccggttaattgaatgtacgccattctcccgagaatgacaaagaaaaagagagcgaaacaaatactgagtatcgctgctcctctgttcataaacttattttttttcggcatgggttatcattcctgtatgtttttcacttttttatctttcagattcaaaccgtgctttttggcgatatccatcaggcgctgcggctggcttaagtcagcagccgtcttttcgagatcaccgatctgcttattcttctcagatactttctcctccagtttttgcacctcaatattggattggtacgccgcgtatgcctttgatacgataaacattgatgtggagagaacggcaatggcaaacaggacgagcagcaccttttccccgagtgtaatggaagccctctttttgacaatcacctttttttcgggacttatcactggccgttgttgtttttcctgctggtaagctaagttgctcataggctgatgacctcctttaatgttgtcatttgctgcccgttattttcgtttctccgcaatgcggagcttcgctgaccgggcgcggttattttcttcaagctcctcttttgatgccgtaatgggctttcttgtaatcagctttaattccggttcaaattcttccggtatcacaggaagacccggaggcagttcgggaagtgatgatttttccttgaatgtcgtcttgcacattctgtcttccagcgagtgaaaagtgatcacagacacccttccgcccggcttcagcacctctatcgcttgcaagagggcctcttcaaatacttgaagctcgtcgtttacggcgattcgtatggcttggaatacacgtttggccggatgacctccgcttcttcttgccggagccggtattgcgtcctttattagatcgaccagttggccggttgtttgaataggcgatttttctcttgcctcttcaatttttcgggcgatctgcttgctgaatttttcttctccgtatttaaagaaaatcctcacaaggtcctcataccgccattcatttacgacttctttcgccgtaagggcggccgactggtccatcctcatgtccagcggtgcgtcatgatgatagctgaatccccgttccggtgtatcaagctgcggagaggatactcctaaatcaaataaaattccgtcaacactcgtaatgccgtgttcatgtaaacactcttttaaataacgaaagttgcttttcaccagaatgagctgtcctttgtattcggacaatgttttctttgcgttttcaagcgccgtgtcatcttggtcaaaggcgatcaagcgtcctttttccgataattgctgcaataaatatgtactgtgcccggcgccgccaagggtgcagtccacataggttccgcccggtttgatatttaaaccgtcgacggtttcacgaagaagtactgtcttatgctgaaacatttgtgtcggtcccacctttatcaggaatgaattgaattgtcagttgttgttgtgatgcacgaagatccattatatatcaaatccaatcatgttttcagcaatttcagcgaatgaatcttcttgctcttctgtgtattgttcccatattaccttactccacaattcaattcgattggaaaccccgatgacaacacattctttttccagttttgcgtaattcagaagagatgacgcaatattaacccttccctgcttgtccagttcgcattcggtcgcaccggaaaaaaagaatcgggtaaatgcgcgggcgtcttttttggtgagcggcagagccttcagcttttcttcaatcagcttccattcattcatcggatagccgaaaaggcattggtccagtcctctggtcagcacaaactgctcaccgaggccttctctgaattttgcgggtacgatcatgcggccctttgcatcaacagtatgccggtattcacccataaacatgataaggacccccactttctcccctaaactcaccactatccgccacttctctccacaacctcattttacactgtttacacataaaaaaaaaccctgaactattcagggttctttaaaactttatttcaaagtttgacaatctgatgttggttttgaaaagaaaatggcagatgtttgaaggttgtgaagaattttggaccgtagcggttcagataatacatcacattccaaatccgttcctgcggagcgccgagcggtctgatgctgttttggattctttcatagtcacgcagcacaaagccttctttttcttcaattcttttcattaccgtccgttctaaaaacaagagctgatcttgaatgaaggcggcattcttctgtaagagcggctcaaggcttgaatcgaccttcagcgcttcgtcccttgcgcgtttatggacagcttcaatctgcgacttcgcctgttccattacagaagaaaactcttccggaatctgctcttcaaaataagtgtctttcaggtgtccggtgccgtgttcgatcgcttcctgaagcgggatattccgttctgaaagcttcttttcaatatggcgctctaaaatcgtaatgttcagtctcggcactaccggcgtcatgcgaaagcccattaatgagaaagcccgcttcagctcaccccaataattgatctcccccggtcccgcgataaacgccagagtcgggatgagaaactcctgcatgagcggccttgtcacaacgttattgctgaaacattccggtttttcttccatatgggtatgaagctcgtcgttcgtccacttcaggtcaagctccttaatgacaaaaacgccgttttctttttcaattaagaaacgctctccctcatgttcgtaaaacagattggcctgatctttgtccgattcaataatcgggtgataaccggcttcccgcataaaacgctgctggtctgacacggctttggcaagctcatgattgtgttttaaaatctgctgaaacatacctgtttccagctttttaatccccggatctcccgaattcatcagaataaggccttcttcttgaaacaagtcggcgatcaacagctcaaaaaagtccgtgaatgtctctgatgagcgtaaacatcgcttcacgttttgaaggagtgcgtttgtgtgatccgtctcctcaaaagcagcgaacacttcatcaatccaagccgcgcatttttcctgatcaagctcggttttagccgccgatgtttttttccagtacgactgcggcagtttctgtttcaccggacctttattctctgttgacgtgtgcacaaaattgatttcttccagatcgtgatcttcacccgccacccagaaaatcggaacgacaggaatctgcaacgcctcttcctgctgtctggcaagtacgataatggagataattttatgtatggtgtaaagaggccccgttaaaagaccggcctgctggccgcctactaccgctgcgctttttggatctctcagtttttcgatggaggcctgcatggcggcggagtaaaatttttcgtgataggaggataaataatccgctaattcctctctggcaaacggccgcgaagacaggtcatgaagccgcttttgccatacgtcctctgaatgaatatcataatcaaaaaatgaagacatgttttctccatctatatagtgctgcacaaacttattttgacttttgatggaaagttcagttagctgcatctgtctggaacttcctttctccaataaatagttaggtttccgaaatgagtatagcatgttaccggaaaacctcaaaagactttgtttcagtttctttctaacgcttttatgctgcggtgtaaaaacgtgagatgaacggccggcaatccgcggctttccgcttcttttacaaggtagccgataatcgcatcggcctctgtccgcctgcctgccatgatatcgacgagcatggaagaatgatttttttccgtcagtctgcaaacttcgcaaaccttgttccacgctttttctctatcggcgaggccaagtattgtctccgcttcttcaaacacgtttctcatatactttttgtaagcgtcatttcttaacagctctccgtttttcacgcgcagcaatgcagttaacgggttgatgcatacatttatgatcagttttcccgttaaaagccgataccagtcgttttcatcatatacgggaaaatcccggtgcatgccggaaaagatgcttttgagcgtttccggccgggatgcgctgaatacactccatcttacggctcccgctcccgtatgttcaacggcatgatctgatatcttttttgctccgtgctcaacagtgccgacataaagcgaatgatccgtatgccaatctttaatgtcgtgtatgtgtcccatgccgttttgcaaaaacagcacattcgtcccttttatcgtctcaagatcccgcaacacagcacttagctggtgctgtttaacggctgcgattaagaggtcgaatccggaaatgatgcctgtttgcgctctgcatgccgccgtacattctattccgcctttcaaaagccgtataccgcctgagttaatcgcatcagcctgctccgtccgccgcgtaatgaccgttacctgatggcgggacgataagtagtaagcacataaaaggcctaccgctccgccgccgataattccgattttcacactgtcacaccctatatctgcatttttccatattatcatagcagaagccgccgcaaattacttcaatttcgttttgagcaaaaagactggcaagcatattatagttggaattttcaattaaagcgtttacaataatggtagaacacaacaaagggggagtttgtgttgaaaatagagcgactgctcatcaactttaagacactcgaagaatttaaaaggtttaaggaatacgggatgcaggagctgtcgatgcttgaagatcttcaggataatatcattgaaaatgacagcacctcgcctttttacgggatttacttcggggataaactagtggcgagaatgagtttatatcaggtaaacggaggcacgaatccgtattttgatcagcgtcaggactttttggaactttggaagcttgaggttcttccgggctatcaaaacaacggatacggaaaagcgcttgttgattttgcaaaatccttcagaatgccgatcaggacgaattcacgcatgaaatcagcagatttctgggataagatgaattttgagcccgttaaatatgatatggcgcgtgataaaggagaaaatccttatatctggcatcccgatatggacggtgaaatgacatccggagaaacggcataataaaaaaccggccgggccgccgcccccaggccggttcattttacaggctctgcgccgattttctgtcgtcttcttttgaattgaccatccttctcgctctgtccataatgtcaattaacgctttataatcttcttccgtcatctccagcttgtttctcaagctttcattttcctcacgcagatcctcgacttctttttgcagcgcggtcagctgttctgtgagtttttctttttcatgacgcacatccgctgcggctggcgactctttaaattgctgcagaaacaaaatgacatcatcaatggacagctctttttctccttccgccctgcggatcggaggctgtttgacggttcccggcagattggcggaatgcaccccgatctgctttcttaattccttccgctgttttttcgccagctctatccctgactgatattgttttctgacataagaattccatctgaacccgcaggcggcagccgttctcgtcagcgctctgccgacttcttcaaaagcggaaagctgggtcccgccttcccgaatatgcctgagcaccacttcggccagcagcaaatcttcatcttgcgtccacgcgtcttgtctcgttatcgtcaatcgtatctccctccatatttgctcatttacctcatacatatgccgctgatagattagatagactactggggctcacaattttttcggcggaagcaggccggaggggcaaaaaaaagaaaagcgcaggaaccgagattcccgcgcttttcttcatacattaattgcttttaacatttatgtctttgccgttgtatgatccgcatgctttacatacacggtgagacaatttcatctctccgcatgacgggcattctgtcataccaggtacatttagtttgaaatgtgtacggcgcaatctttttttcattttagaagttcttctaaaaggtacagccattattcccacctccttaaagagttaagattcatcatcttgtgttaagagctttttcagatccgcaagtctggggtcgatttgatttttcttgtcttcctcagaaatcacttgccaatccttccccacttggggagcggctccttctttttgttcagtttcacaaaagacttgcataggaatttctaaaagaatctcttcttttatgatcggagttaagtcgacggtatcgtcttcagcaaaatgaacgtcctcatcttctatatcatccgacttatgaaatctaaacagttcttttgtcgcgattgtaaatggatacggcacatcaactaaagttcttgagcacggcaaaaccatttcgcctgaaatcgtaaagtcaaacgaaacttgcttggattcaatctccgcgcggcccttcacccggacgggagaaatgcggcggatgtcagaattcaattttgtcagctcatttaactcaactgtttcatcaaattcaaagctctttttcgccatttgatgaagctgataaatcgtccatttcatttgtatcacctcaggaaagcaacaaacatgattatagcttttcagaatgtttttgtcaatattttttctttacagcataatgccgccgtcatgcaatcgttgacagccggataggctatgcatacactaaacgaaacggactaaaatatgcacttcatttgcaaatgtaccacacgaagcaaaacatagcaagaaaggcgggacaaatatgaaagcagtcggcctggttgttgaatataatccctttcataacggacaccgctatcatgcggaacaagcaaaaatcaaaacggacagcagcgtcgcggcggcggtgatgagcggcccttttttgcagcgcggggaaccggccgccgtctcaaagtggggccggacaaaaatggcgctggaaaacggcgtggatatcgtcattgagctcccttatatatatgccgtacaaaaagcggaattattcgcgcgcggcagcgtttcgcttcttcatcatttaggatgcagcagcttgtttttcggcagcgaaaacgggcggatcgaaccctttattgaagcgtctgaagcgttcagccgaaaggaagatgactgcagcctgattctgaaagaggagctgaaaaagggtctcagctatccggccgccgcctcaaaagctttttcacacatattcaaagggcgggacatgctcgatttgtccaagccgaacaatattctcggttttcactacgttagagcgatacacacctccggttccgctatgaagccttatacgacagccagaatcgcttcccaatatcatgacgccgagcttcccggagataacagccggatagccagcgcaacaagcatccggaaagcgctgatagaaaaaggaacggcggccgtaaggagctttctcccggaagcgtctgcgcgtgagctggaggcatacagaaattcatacggcatatggcacagcacggaagactatttttcatatgtaaaatacagcctcagcactctttccgctgaagaattgagccgaatctatgaagtggaagaaggccttgagcacagaattctgcgcaccatcagacaagcccgatcctatcgcgaaatgatggaacgattgaaaacaaaacgatacacgtggacgaggctgcagcggatgaacacgcacattctgacacggacgaaaaaagaagacatgcatcggctcttgcagccttcaagcgctccttatatccgtcttctcggaatgacgaaaaaaggacaggcgtacctgtcggcaaagaaaaaagagcttaccgcacctctcgtcagcaagctctcttctttctctcatcccgctctggatctggacatactggcgggacgggtttacagcctgccgataaacgaacctgaacgcacattgtttgagaaacaggaattttcacaagcgccgatccgctatgatgaagacgaaaagtgttttttgaatgcgtaaaaaaagcacctgtctgtatcaggtgctttttactttcagctgatccaaatagtcaagtgcgtcctgcatggtgtcgacagggacgattttcatatcggacttgatcgctttcgccgtttttaccgcatttttgtaatcagaattttcagctccgttttgattcggcgcaaagaaaatatcttttcccgctttgtctgcggcgacgactttctgatcgattccgccgatcggtccgactttgccgtccacgtcgattgtccccgttccggctatattatagccttttgtttcgtcaggttttgtcagctggttgtaaatttctaaagacatcatgagacccgcagaaggcccgccgatgttttcaatgctgaaatgaagatccggcttcactttcacgttccggtccgtatataatgcgacaccgattcccgctcttttcgggtcgtccgggaatgatttcagcacaatgtcaacggtcttttctttcgtgtcccgttcaatgtgaaacgttactttttcccccgcttttttgctgctgatataatcaatcagcttttcagcggattcgtatgttttcccgtccgcgctgatgattttatcaccgacctctatttttccttttgccggcatgtcagagacgactgagctggcataaatgccgttaaatgagtatttcacctgtttcccggctttttgataagcggcaatgaccgcgttttcttgggagcttttcatcatttgcagctggcgcttcatataatccgagtccgattcgccctcttcttttatgctttcatcagggacgatttcttcgtaaggatgcactttcgcccaaagatatgtatacggattggcggggcctactttgacagtcatcaaggaaaggcttcctttttcaggatagcctccgtccaccttaatcagcggtctcagctctgatgcttctcccggctgtgtgatgtaatacgggagcttaataaatgtaacagcgattaataagatcaggatgataaacacccagcgaaaatgttttgctttcatatgagttagccctcccagttctctatttcttgtttaatccggccgatcatccggtctgcggcttcttcgcccgctgtgatcatatgatcaatgttggcaaaagaacttgagctgaatgattcaagagaagggcggatcatgacgtctgcggcaatggtctggtgacggaccaattcattttgcagtatatccatactttgcatgattacatcaaaaatatgtgccgccttttccgtttttttcacccgggatacgtcagaggcgatgacgatatcagcacccatatcttttacggcggaaaccgggattctgtcgaccaccgcgccgtcgactaacatacgtccgttcattttttgcgggacgaaaacgcccggtatgctgatgctcgcgcggacggcttcggacactgaacctttcgtaaaaacgagtttttcgccggtctgaaggtcgcaggccacgatgccgagcgggatccgcagttcttctatcggcttgccgtacgtataggcatgaacgagctgcctgatgcggtctccttttaaaaatccgagcttcggcatcgtataatccgcgtacagccgccgcttaaatgctttagcgacttttttcatcgtggccacgtcatgcccggccgcataaaagcttccgactaatgctcccatgctgctgccggcaatcatatcaattggaatctgatgcttatgtaaactggataacactccgagatgagcgatgcctcttgcccctcccgaacctaacgctaacccgattgtaggtttggccaacgcgacgaaccccctaatagacatcctatacatgaattctatggtctaaattgaacccctatgctcgtatattagtacaggatgacaaataggtacttgcccggccgcctttaaggtctgttctatattttatcatgatataaatgtcagtgtgcaattttagcatcggggaggtaagaatgaatttgtctaagtttcatacatttttgatttcattgtttttcatttttttgacggctacggttatttcacaccctcaggcctcattcgaagcctccaaaaccggtctttccatgtggtgggaggtagtttttccttcattgcttccgttttttattctatctgagcttttaatcggattcggcattgtcaagtttgtcggccttttactcgaaccctttatgcgtcccattttcagagtgccgggggtcggcggatttgtactggctatgggcatggcttcaggcaatccggccggcgcgaagctgactgcacggctgcgccaggataaacaaatctccagagtagaggctgaacgcctcgtctcttttaccaattcatccaatccgttatttatattcgctgctgtggcagtcggcttttttcataacgcgtctctcggcattctgctggcatcggctcactatctcggaaacatcgccgtcggcctgacgatgcgttcatacggacggaaagaagaagcggcgtataccggtaaaaagacgatcgctctcccttctctgaaggaagcatttctggccctccacaaggcgcggctttcggaaaaacggccgctcggaaaaattttgggcgacgccgtcacctcttctgtacaaaccttgctgatggtgggcggttttattatattgttttcggttttcagccggttattatcaatcgtacaagtcatggatgtgctttctgtatttacaaacgcgctgctttcgctttttcatcttccggcaaatctggacatccctcttatcagcggaatgtttgaaattacacttgggagcaagctggtcagtgaagctgatgccgccttgctgccgaaagccatgattgtgagttttattctcgggttcagcggcctttccgtacaggcccaggtagccggcattttatcggaaacagatatccgctttaaaccgtttttcgcggcgcgtatccttcagggcatttatgccgcactctttattctcttactgtggaagccgctttaccttgcgttggacaaaccttaccagtccgtattcctccctttccgcgatcaggacgcaggatctgctgccgtcagcggctggaatacacttgttgaaaccggtcccgccatcacgctgacagctctcgccgtatacgcattgatttattgttacaggctgtcagcacggacaaaaaaaggatgagacgccaatcagcgcttctcatcctttaaatttctgcatcagcgcctgttcaacttccggaggaacaaactctgaaacaggcccgttatattttgcgacttcttttacgatgcttgaacttaaaaaagagtactgattgttcgtcatcataaaaaaagtttctattgattcgtcgagcacgcggttgacggaagtcccctgcatctcatattcgaagtcagaaacggctctgagccccctgataatcgccttcgcccgcttttttttcgcatagtcgattaacagtccctgtgacgtctcgaccgtaacattcggtatgtcttttgtcacttctcttaacagctcacatcgttcctcaactgtaaacagcggctgcttagaagaattattgagcacgcatacgtacacctgctcaaacacgtttgccccccgtctgataatgtccagatgtccgtaggtaacgggatcaaaacttccgggacatacagctatacttgccacatcattaccccctatttcggtatatcgtcactcctgtaagcccgtaaatttcccttcttgttacagaaagcgcgccgacggcttcaggaagcgcaacggctttatcatgctcggctacgacaaaaccgtcttcattcagcatgttctgctcatcaatcatttcgataagcgctttcagcttttgttccttatacggaggatctaagaaaattccgtcaaaacctttttcccgtttcgccgcggcatagagggcccgctctgcatcattgcggtatacttccgctgaagacagcagatcaagcgctttgatattcgcttttaccgtttggatggctttgaaatcacgatccacaaagatacagcggtcaaatccgcgcgacagcgcttcaatcccgagaccgccgctccccgcaaacaaatccagccccgttcctccgtcaaaatacgggccgatcatattaaaaatagactcttttactttatccgtcgtcggccttgttgatgtgcccggcacagcctttaaggctcgtccttttcttgaaccggaaattactctcattattcacaccactttttctgaaaactttgatgtttctcatcggctgagccgttatgtatcaaaacaatccctatcttatcataaagcattctttcaaacaatgaacgtgaaaaacgtgtatacatattcacattcctgtcaagactacgtgtaacagcatcaatgaatgatgttgttgccaaccgcggagaagacttacgtttccccataagttcttcctccggtttctcctctcccttttccttctccttaacttgttaaggaatagaaggaccccgcaggtatctgcggggatttttttatatgccgattttataatcgtactctttcgctttatcaagctttgattcaaattccagctttaaaaaaggtttataagaaggctctaccttcttcacatatgaataagaagaaatcttttccattgttttttcgattaggtccatatcgcaatacagcacaacgtatttcagccgcttggaaacataatgaacgttgccgaattttctcagcattttgctgtgttttaaggaatgcagatatacgattatgccttggcgcttattttccatcatgatcacccgcctgactttctgttcattttatgtaaaagacgagacggccgtctcgtcaggaaactttgcatccgcagccgccgccggaaccgcacccgccgccgcaggatgacaggccgtcaaaataaggattccccgtcggaacttttacatgctccgagacggccgttccgagttcaatgctgatctcgtcaagcagcgactgaagctcagtctccgcttttttaaattcggccaccttatcgtttaaatccagttcccgtttcatttctctcatttttcgggaaatctctctataatcaggatggtatttgccaaagcgctgcacatcctcatactgctctttaacgctcataaaagaacgaatgatccgccctgcctcttcatcttcacggagacgcttgtaacaatcgcggtaattttcagccgtctcagactgcagaatcatgccggcaagctgctccgcttcactttgaagcttgacggactcaattgttgcatacataaatacgcacctccagttgctagtttaccatgaaaccacccaattggaaaatgcggcgtttaaacgctttttaatcctgtgaacgcatggcgtgaaccatctgcatcatcatctgcgccatttgaatcccgtttgagaattggcttacccgatgcggtatcgtcttttcataaaaattcatcatgtcaagctgaaaggaattgagatcgtccggttttctcgcaagtctgcggtaccagacgggacgctgccgtataaaccgtttccgttcctcatctgcggatatgaattcctgaacctcttttcgcatacacgatccccttctttaatcctttctgaacgaaaaaggatgttgtccggagccttgccggggctgcttcgtgctgctccccgaaaattggcttaaaaggctttgcaatgatgaaatggattggctcattttattgatctgctcattcatttggttgatatccatctttttgacggcagtgaccatttttgaaacgaaatcgtttttttcagctggttcctgtttggtttccgcgtcggaagaaggctgaacggcctcgtctttaaaagggtcccatatcggatcatcctcgcccagaagaacccaattttcatagacttcctgccagcttctttgttccttgcgaacattttggatcagtttgggatgcttttttacgaattgtttaaaatcatcgattgattgccgtgattgctgattcgccacaattctcaccccctccgaaaagttttgcctgctataatgtatcggttcatgcgccttaatgttcgcctaaattgagaaaaaaagcaggtatatataaaaattgtttttttcgccaggagcaccgctcgcgaaaaaacataaaaaaaccgcgggggacgcgcccctctgcggttttttactgccaaggcttaatgaagttttgcgtataatacttctgatcaacgccgacaccgaggtgcgtataatccgggcttaacagcgcctttctgtggccttcgctgttcagccagccctccacggctgcaggaccgtccacatagttgtaggcaatattttcaccggcctcccggtatttcacatcgcctttttccaagcggtccttcagagtcccgtatttctttgagacgtgagagaaatacttgttatccttcatgtccttgctgtggccgaatgccacttttgcggcgccttcgtcccatttcagccttgcaagtccgtgttttacgcggatgacatttgtaatatcgagaatctgctgttcactcgctcgttcaatatcgttccattttttatcagaaacaggctcgggttctgtcagctttcctctgtacatgacttcatacggcctttgtttcacaagtgtttccgcatcaaatgccctgatgcttgacagattcccgtcaaatttgtccatgtacagctgaacatacattccgcctatcttgacggtgggacgggtattgatatcttcttcagaaaactcgaaccgatacgtgtttcccttgtcagtcacattgacaaaaggagaaacctgcgtcgttttaaaaacttcgccagtcgattcgccgatcttaaacggttttgcgttgatgccgcttcccgaagcgtataaagtcacggctttatcattcaaaataccgacttgtacgtattggtctttcccctggttgtacacccaccactcgtaatcgtaggcagaaggatctttccgggacggttccccaagtttctttttcacatcggcggcagatttccccatgagagaaagcagtccggatgacggcattttcagccgttttccgctctcttcttcattggaaacctgaggctcctcctgatccgtctttttctgaggagccgatccatattgtataaacagaacatacgctccgtaaataagcaaaaggataacgagagcccttgcgatatttttcaacctctcacccccatatgttcaaaccgttctgtttttgtttactcttatacagtacagcctatttgcatcgtccgtgatttatgtttaatggataaacccctccggaccgccgtcttcagaaatgtcagacagcactcggcctgcttgctcatttgattgctcggccaacgaaagatcgccgagcgtaacaatgccgaccagttttttatcccttgtgacgggaattcttctgagctgatgttcagccatcaaatggagcacctcctccacagaggcgtcttcctctgcactgataacccgctctgtcattgcgtcggttattttttgagagttcggcttttttgaagcaattccccgtaatacgagatctctgtctgtcacgatcccgacaagtgtggcgccgtcttcatccactatcggaatggcgccgacatctgcgtctttcatcttcaccgcagcttcatatacattatctaatactgtacaatattgcaagtctgacgtcatgagcttattgatctttgtcattgcggaattcctccttttttctgctactattgtcgtcaaatttttcattttgcatactttcaccgtatgaatcattgaaagtgtaacgctttcatactatgattgtcaggaaagggcatttttaaaaggagggggaaggtttgaagtttgaaaacagcggtcttgaaggggtaacagcggagctcagccgcttgaatgatctgatggaaggtaaagggctcattctggctggacaatgggattatgaaagagtgacttacgacaaaaagttttcagtacctgaggggacattttatctgcggattcaaggaacggcaaaagagggcgatgtcggcggcagccgggccgtgattcagctgaaggcccctcttttaggaaagcattattatccgcacggcgtagaatacggcagcgctgaagaatttccggaacatgtcgtcgctgaaagcaaagctttactgcttgaattggaagagtcattaaaaacagtgcaaatgtaataaaaaagtacagcatattctgctgtactttttttcatgagacggtatgctcgatatacggcggctctgacagcgtatctttttcccgttccgttctgacccactgaaaaaagatgacagccaaatatgttccgtagaccgcctcttgaatgattttcatcagtactgccccaagctgctgatcttccagaggagggagcgtgttaaacatctccggtccggataaagggatctcctccagcaaatctaaaggaacgcaaagcttcattgcttcggcccaagccgccggatctgtatacgtggcatacatgggcgccccgctgaacataatgagcgcgcaggccggcgttaacagaatcccgtctgccataatataccccagcttcattaaaccgctgagacggggcagaccgtccaccttatgcacaagcggccaccacataaaaaacgccgttacaaagatgagtccgttcatcagcgtgtgatacagcgaatccgttttgacgaaatcaaatataaacgggatgtgatacagtgaaaaaataccgttaaacagcactaatgcgataagcggcattgaaaagaacgaaaacagcggctttacgacaggacggaagatcagttttttccatgcccagccgggaattccggaaatcaacagcggcggtacgactaaaaacagaaccgccatctgcgtcatatgggcgctgaacatcacatggcccaataaatcaaccggacttcccgcagccgcgtaaaaaaatagcgcggaaagcacaaacagcaccttctccttagcggacacacgtcctttatgccggctgcaccagtaaaagtaaacacctgttatcacggcagttatacaaaacagatatgggctccacattgcgcgaaacccgaacatttccaaattaatcaaatctctcactccccgccgccccgattaccaccaaataatcgtgacaaatgcaagcacggtgataaacgcgacaaatattcccgaatacagaaataatgacggcgcttcatgccccttctggctcatatgcataaagtaaaacagctgaaagatgacctggatgaccgcaagcaggatcagaaacggcatcgtaaaccatccggcaatgccgtcagcagccaccgtcaaaaacgcgacaagcgtaaggccgatcatcaaaccgaaggatatgacctgatatttcatctcctcggcatttttcttttttcgatattcgagatccgtactgacagtccctctgtttttgttatcgtccatcgttatcccaccatccccatcaaatatacaacggtaaagataaagacccacacgacatcgataaaatgccaatataagctggccacataatatttcggcgcattataaaggctgagccctctttttgcattccggatcatcagcgcgctgatccacaacagcccgaacgccacgtgtgctccgtgtgtgccgacgagcgtgtaaaacgctgagccgagcgcagagcttgtaatggtaaagccgaattcgtgagtgtaatgcataaattcatagatttctacccctaaaaatcctgctcccaataaaacggtaaccaaaagccacacctgcatttttttaaaggagaaatttttcatatgatacatcgcatacacactcgttaagctgctcgttaaaagaagcatcgtcgcgataaatacgatcggcagctcaaacatctcagccgttgacggccctccggctttagattcccgtaaagcaaggaatgttgcaaatagcgaggcgaacagaaccgtttccccgccgagaaacagccaaaatcccaaaaacttatttttcccctccagcgttgctttttcaggagaagccggaaaggtttcagccgtcattttttcctgcagctgcattacgccttcacccctttatcatcattcggcagatcttctttgtgaatatgatagccgtaatcatcgaccacagagcgaagcagcatggtaaagaatgtgatgccgagccctatgaagataaccggaagcccccatgaataatcggagtggtataaaaacccgaacgctgcgacaaacagcccgaaagatatgataaacggcatgatggagccgttcggcatatgaatgtcctctacaggctctgcaggcgccatcccttcatttccggcctgcttttcaatccacagcgggtcaagtccccggacaaacggaagctgtttaaaattatattccggcggcggcgaagagaccgcccattcaagcgtacgaccgtccagccacgggtcgttcccgacgtatttcccctttattgaggtataaataatattgacgacgagtaaagcagccgcgcccgccatgaaaaacgcgccgattgaactgatcaggttgccggtatcaagcccctggccgggcagatatgtgtaaacgcgccgcggcattcccatcaaaccgaggaaatgctgaatgaagaaggtaagatgaaacccgataaaaaataagacgaacgaaattttccccatcgtttcatgaagcaccttcccgaacattttcggccaccagaaatgcacccccgccaggatgccgaacacaacgccgccgataatgacatagtggaaatgcgctacgacaaaatacgtatcgtggaactgataatctgccgctgcggccgccagcatgacacccgtgactcctccgagtacgaaagaaggaataaaggcgacggcatacagcataggcgtcgtgaatttgacatttcctccccagatggtcaaaagccagttgaaaattttaatgcccgtaggcaccgcgatcgccatcgtcgcaaccgcaaatatcgcattagcgatcggtccgagtcccgtcgtaaacatatggtgaacccaaaccatgaacccgagaaagccgatcagcacgatcgcgaagaccatagacgaataaccgaacagacgtttcctcgcaaatacgggaatgatttctgaaaaaatcccaaaggcgggaagaattaaaatgtatacttccggatgcccgaaaatccaaaacagatgctcccagattatcgtattgccgcccaattcaggattaaagaaattcgttccgaacaaacgatccagcatcatcagcgccaaaccgacggtgagcggaggaaatgcgaataaaatgagtgccgacgccacaaatgtcgtccacgtaaacagcggcagtctcatatacgtcaaacccggcgccctcatattaataatcgtggcgagaaagttgatccccgcaatcagcgtacctaagcctgatatttgcaggccgagcacgaaaaagtctatgccgtgccctttcgaattcagcgcaagcgacgcgtacgacgtccagcctgcatcaggagcgcctcctaaaaaccagctcagattcaaaaagatgcctccgaagaaaaacagccaaaatccgagcgcattcagaaatgggaacgatacgtcacgcgccccgatctgaagcggcacaaccgcgttcatcagcccgaataacagcggcatcgccgccaggaagatcattgtcgtgccgtgcatcgtcataatttcattaaactgctgagcacccataaaatcgttccccggcctcaagagctgaatcctgataagcatggcctcaagtccgccgacgacgaagaaaaatcccccggcgatcatatataaaatcgcgattttcttatggtcaaccgtcgtcaaataatcccaaagcaaagagctttttctttgctgtcctgtaagcgtattcatcatttacgacctcccccctgatatctccctgtcctcacttgttctccgctttcagcccttttaaatattcatacagcgcatccgtttcagcgtccgagagcttcggataagtgcctgtcattttattgcccggtttaatgctgtccggatttttcagccaggcttttatattctctttattcgcatccttaatgccggccactttgacccgttcaccgaaggtagcgaggttcggagccgttcttgccgcttcagcccgtttatcattgggctcaaccgcatgacagctcaggcagtttttttccttaaacagctcttctccttgcgcggctaaaccggaatctgttgtatgcttataatttttcatcgctttcgtccattgtttaaattcttttgacggcagcggtttcactttgaaatccatcagcgcatgtgaaggtccgcacagctctgcgcatttcccgaagaaatattctcccgcttctttgctgcgtttagaatcgaaggtcagaaagaaagtattgtcattatccgtattcgtatcgatttttcccccggctgacggaatccagaaagagtgtttcacatctgaggacttcagcttgaaatagacgcgttcatctgtgggaacgatcagctcctgacttgtcacaaacccgtaatcaggatactcgaattcccaccagtataaattcgcccttacattaatcacgagcgcatcctctgctttacggtttttcttatccatcggcgacgtatccgccagcgccaatgtatcgatgacaaccggaatgacaagaataatcagaagcaggatcggaataacggtccaggtgatttctaaaaaacggttcccctccacctgtttcggtatcgtgtcttcccctatacgcgaccgtctgaatctcacaatgacgtaaaagaaaataactgctacgaccgcaacgacgacaaccatgataagtgtgctgagcaccgtcagatcatattgtttatcagccacttcgccggcaggcttgagtgtggacagaaacggttttccacagccgctcaataaaagcggcactaaggctaataatgataaaagacgccaacgctttaacatttcacccaaccccttttttgaatcagtacgagatgcacaagcagtaaatctgcttccagccgaaatacttcttttcctcatttcttaaaatatgagattttttacttaaaattccatctatgtataaaagcaaagccgcctgattaaacaaaaggtcaaggcggcgtttactagttgtcattgtttgttttggcgatcaaacaagctcattatttaattaaaacagcgtaaagaccaccatcgctacaaaataaatggtcatgtaattaagcgaatagacaaacataagagttgcccacttcatgatgtttttcatgcggaatcccatcagtccgagaacaagccatccgacattcagcaaagtgccgagaatgacgatcggaagacctagactgccgaggaaaaatggaagcggcagcaggcatgcgacccagacgataatctgtcttttcgtcacttcaaagccgtgcactaccggaagcatcggaatattcgctgctctgtaatcttccgtcttcttaatcgcaagcgctaaaaagtgcggaatctgccagatgaataaaatcatgaataaaacccacgcgacaacaccgatgtgcccttcaaccgctgtccagccgattaacggcggcacggcgcctgatacacttccgacaaccgtattaatcgtataacggcgtttcgtccacattgtataaagaacaacgtacgtaaacacgccgataaaaccgatgactgctgccatcacggtggtcatcaaaagcatgataagtcctaaagcaatgagtaaaattcctgaccacagcgcttgattcggctgaatctttccggttaccgtcggtcttactttcgtgcgttccattaaatgatcaatatcacggtcgtaatagttgttaaccgcacaagaaccggcgatgatcaaagaagatcctattaatgtaagaagcacggtgtttaaattgcctaaaaaactcagaccggatatatgtaacgcaagccacatgccggtaaaagtcgtaattaaattcgaattgacgattcctattttgataagcgaaaggaaatccttccatgccgtcgtctcttcaatctgtccgtctatagctgtatcgtttaaaattctggaattagccataacgtaaacctcccttacaaacctaaagcaggttttttaagacctgcaactctatcatacaagataatgacctgtaaaaaaacatcctcttaaatattaaacgagaaacaggaatttatttgtgaactttttatgaattttaccaaatccgccggtttcataataaagcggttactttatttctatcagacccatctggaataatcaaccccattatctaagaagtcctgattctattatatttttgtgaacaaacagaattgagaattgccacaaaacacatattcgcttacacttggtacgtatatcattttgtccagtttgttaagaaggtgaatgtaaaatgaataaagctttgaaagcgctcggcgtgctgacgacattcgttatgctcgtcgtgctgatcggcggcgctcttgtcacaaagacaggatcgggtctcggatgcggaaggcagtggccgctttgccacggccggtttttcccggagcttaacgccgcttctatcattgaatggagccacagactcgcaagcggtgtctcaatcgttctcgtgctgagtctcgctttttgggcatggagaaaagtcacgcctgttttccgtgaaacaacctttctcgccattatgtccattatctttttatttttacaggcgcttctcggcgcattagcggttgttttcggatcaaatgcgctcgttatggcgcttcatttcggcatatcgctgatttctttcgcttctgttctgattttgacgctgctcatattcgaagctgataaatcagacaaaaagctcgtcaagccgctcagaatcggcaggaaaatgcagtttcatatgatcggcctttcgatttacacgtatatcgtcgtttatacgggagcttatgtgcgccatacgaaatcaagccttgcctgccctgacgttccgctttgcagcaggctgaatcacgggcttccgtcccattttcaggaatgggtgcagatgggccacagaacggcagcgctgcttctgttcgtatggattcttgtcgcttttgcacatgcggtgcgctcctacaaagaccaaaaacagattcttgggggctggatagcggctcttgcctttgttgtattacaggcgctctccggaatcatggttgtttattcagaaatggccaccggctttgcacttgcccattcgctctttattgccggcctgttcggcgtcttatgctatttcttattattaatcgcccgcttccgctatgaatcaaaacagcggtacatctgaggcacatgaaaaggccgaagcattagagcttcggcctttttacatctaaaaaacctgatcgcacacgagggcggatcaggtttttttatgttcattttttacgctttttcaatttcgatcagtaaatcgcctgtctgaatcggttcaccgtttttcacatgaatctgctgtatcgtcccggagaacggcgcctgtaccgtcgtctccattttcatcgcttcattaatcatcagatgatcgcctttattcacctttgccccggtttccgttaacaatttaatgacggttcccggcatggatgccgcaatgtggcttgggtttgtccgatctgcttttaatttttcctgtacggatgatttaatgctttcatctttaatgaccacctcgcgcggctggccgttcaattcgaaataaacgacacgtgtcgcatctggctgcggttcaccgatagatacaagcttcacgatcagcgtttttccgcgctcgatttccacttcgatttcttcaccgagtgtcatgccgtagaagaaagtcggtgtgtctaatacggaaatatcaccgaagcgttccgccgttttaacatattcagtaaacaccttcggataaagagcatacgcgattgcgtcctgatcactcaattccatatgatgtgtttctttccattcttctttaatgccttcaaaagataccggttcaagcagctcacccggtcttaccgtgatcggcgtctgccctttcagaacgagcttttgcagtttttccggaaatccgccgtgcggctggccgatctgccctttaaagagctcaacgactgaatccggaaaatcaagcgtttcgcctttatcataaacatcttgttctgttaaattgttttgcaccatgtaaagcgccatatctccgacgactttggaagaaggtgttactttcacgacgtcgccgaacatgcggttgacgacgctgtacatgtctttcacctcattccagcgatcaccgaggccgactccttttgcctgctgctgcagattgctgtactggccgcccggcatttcatgattataaatctcagtatgcggagacttcatcccgctttcaaattcactgtaatactgacggacggattcccagtattgcgacagtctttccacctgccggacatccatttcaggacggcggctgtttccttcaagggcatgataaaatccgcttgcgctcggctgtgaagtcagacccgccattgagctgacggcgacatccacgatgtccacacccgcttcaacagctttggcatagagaaagacgccattgccgctcgtatcatgcgtgtgaagatgaacgggaatatcaatcgtttccttcagcgctgagacaagttcgtatgcggcttgaggtttcaaaagaccagccatgtctttaatgccgagaatgtgcgcaccagacgcctcaagctctttcgccatagaaagataatattgcaaatcatatttcgtccgggtcttatcaagaatatctcccgtgtaacaaatcgcagcctccgccacttttccggtttcacggacggcatcgatggccagcgtcatcccttttacccagttcaggctgtcaaagatccggaatacgtcaatacctgactccgctgactgccggacaaatttttggatgacattgtccggatagtttgtataaccgacggcatttgatgaacgaagcagcatctggaacaatgtgttcggcacttccttgcgaagatcttcaaggcgcttccaagggtcttcttttaagaaacggtacgctacatcaaatgtcgcgcctccccacatttcaaggctgaacagttcaggccacagggcagccgtaggattcgcgatttttttcaaatcattggatctgatccgggttgcaagcagggactgatgggcatccctgaacgttgtatcggtcaggagcacggatttttgctctttcacccagtctgcaagcccctcagcgcctctttcatcaaggatctgtttcgtaccgcttgccggcttttccccgatacctaacgtaacggtctgaggcttatcaaatgcaggtttttcttttttcccgattcccggaaaaccgttcaccgtgacattgccgatataggaaagcatttttgttccgcggtccttctgttttgggaaaacaaacagctcaggcgttgtgtcgataaacgatgtgtcatattggcccgtcaggaatttttcatgctttgccacgttttcaagaaacggaatattggtcttaatgcccctgatcctgaattcctgcaggttgcggaccattttcgctgatgcctgttcaaacgtcagcgcccatgtcgacagcttgacgagcagtgaatcataataaggcgtgatgacggcgccctggaagctgtttcccgtatcaaggcggacgccgaagccgccgcctgagcggtaagccataattttacccgtgtcaggcataaagtcattcagcggatcttcagtggtcacacgtgattgtatcgcatacccgtttgtaaaaatgtctttctgctcagggatattgacggcacggctgtgcagtccgtggccctgcgcgacgaggatttgcgtctgaacgatatcaacccccgttatcatttccgtaatcgtatgctccacttgtacgcgcgggttcacttcaataaagtaaaattcaccgcccgctacgagaaattccacggtccccgcgttgatatagccgacatttttcgcaagcgccacagccgcttcacagatttcgtcccttaattcaggctgcaaagatacactcggcgccacctcaatgaccttttgatggcgtctctgaacggaacagtcccgctcatacagatggacgacattgccttctttatctccgatcacctgaacttcaatatgcttaggattttcgatcagtttttcaacatacacttcatcgtttccgaatgcggctttcgcttctgatttggcccgctcaaacgattctttcaattcgctttcgcttcggacgattctcattccgcggcctccgcctccgagcgatgctttaataataaacggaaatccgtggacttttgcgaattgttcgacatcttttaatgtttcagccggtccgtcactccccggaataacggggatgccggctttttctgcctgctccctcgcctttaccttatctccgaacatatccaaatgcgctgacgtcggtccgataaatacgatgccctcttcttcacagcgtctcgcaaatcggatattttcagagagaaatccgtagcccggatgaatggcatctacgccgtttctttttgcgatctcaataatcccttcaatatcaagatacgcgtcaatcggttttttgccttctcccactagataagcttcatccgctttatagcgatgataggagcccgaatcttcttttgaataaacggctaccgttctgatgttcaattctgtgcacgcccggaaaatccggatcgcaatttctcccctgtttgctactaacactttttggatggattgttgtgacaaacttttctcccccttggcctaataaatatgtagtttataataaaggaatatccgtcctgtgtatacacttgttttttagagatacacagttttttccgtctgccgtctttttacccccttagacggaacgggctccctctttttcttcttttctgagtacttgacatgcatgctgacattcaccaatataccggcgctcgttaataacaaaaacattgatgaccctccgtagctgataaacggcagcggaacacctgtgatcggaattaaaccgctgacaccgccgagattgataaaggtctgaatcgcaatcatgctggatatcccgattgccaaaaggctcccgaacggatcttcacattttctcgcaatataaaaaccttttaacacgacaaaagccagcagtacaatgacaaacaggacgccgaaaatgccgagctcctctgaaataaccgccataataaagtctgtatgcgattcaggcagataaccgtatttttgaatgctttctccaagaccgagaccgaaaaaaccgcctgagccgatcgcataatacgaatttataatctgcaggcctgatgtgctggcgtatttaaatggattttcaaggctttcaaaccggctcatacgcccgggtgtcaaaatatcgtcccatttcagatagatgatcgggctgacaaggagcaatacgattcccgccatgagaaccagcctgagcagggtccttccgctgaatcccgaacacataatgacgcaaaacgcgatcagaccgataatcatcgccgttccgaagtcgggctgaatggcgataagcgcacaaataactacggtgacgatcaccggcggcgcaacccccgtcaaaagctgatcgatgtagctttgtttctttgcgtataccgcggcaaggtacagtatcagggtcagcttgacaaattcccccggctgaatggccattccgccgattttaaaccagctttgcgcgtttccggcaacatgtccgaaaacaaacagcgcgcaaagcgcagccactgacgcaagcagtatgaatttctgaatcttttgatgggcgaacactttgtacggaaaaacggccgcgatgataaacagcacaaaccccgcgatgacggcgaacagctgccgtttaaagaaatagtcgctgctcacgccgtaacgcataacggcggtaatcatgcttgagctgtataccattaccaatccgaaacagcacagcagaatgatagcgcatatcaatgaataatcgtaagattttaacattcttttaaacataacatcctctttcctgcttaaagcttacgtttaatacctatagcgtattatattttactataattcataaacaatttacgcagtttctttatagtttttcggatgaaatgcagattaagagaccgtcttacgaaaagaagatgcaaaaaaaacggtttacggttataaaaaaacccaaaccgttgaatagtttgagtttgatcatttattttcctgtaaacgcgtcatgcaaagcagacagttctctttcaagtctgtccagcagctctttgccgtcgttttcgtcaactaatcccaggcggacagcaaaatcgatttccctcgacagtccgaacatctgagtatccaagacctcttcatacagaggacattgaggcatcgttaagttatccatttgtactcggatcagcttcaaaatcttctcagcatctaacttcaacagctcgaatgctttctgctgatggtcaactataatctctgaagccaaaagtatccctccgttccccaggcgagtacctaattcttctatttatcataaagggtatcagatgaaattgcaagagaatttaagcagatgttatgataaaaaatgtttcaaaaaatactcagcctgtatttctcagacatgatttccaaaagcttcacacccgcgatgctgttgcctttttcatcaagcgccgggccgaatataccgattccgaagttgtacggcgaaatgcccatgattcctcccgaaacgccgcttttagcgggaatgccgaccttgatcgcgaattccccgctcgcattgtacatgccgcatgtcaccataaacgtcttgcagattctcgccacatcttttttaatgacctgctccccggtttccggatgcttgccgtcaagggcgaatacacagccgattttggctaaatccagactgctcatcttaatcgcgcactgttttgtatacaaatccatgacctcttcaacatcgcctttaaaaatgtcatactgcttcatgtaataacacatggcccgattaatcatggatgaactgaattccgattccgcgacatgtctgcaatatgtaatgtcctgattattcgcaagtcttctgatgaatccgagcaggtaatccaggcggtctttcggcgaatgccctttaatgaaacccgtaacgatgagagctcccgcattaatcatcggatttaaaggcttgcccggattcactgtttcaagcttaatcatggaattaaacgggtcgccggtcggctcctgacccacgcagctgaacaccttttcctttccgtaatccatcagtacgagcgccagagaaagcactttcgaaatgctctgcagcgtaaatgtccggtcggcgtctcctgccgtcagacatgtattttccgcatgataaatcgtgaccgaaaggctgtcttgttcagattcagccagagccggaatatagtctgccactttgccttcttcggttctttttttcgcttcctgaactaatgcgtccagctcttggtaatgccggcataccatgtcgatcatcctcacttcgctgccgttgtatacatctaatttgcgacgcaaagtgacaattcatgcgaaaacttttatactttaagtaaaggggggcttcaccatgagcgttattcaggtaaaaggcaatgttacatatccgattacaattgatccgagtgtctggattttcgatgaccgcaagtttccgtttgaaaaaaatcagcccgttcatccggacggctctgcagaaacccaggagcatacgcttgatccggaacgagtgatcagagaagggcgcatttcgccgccgactttaaaaagcgaaaaacgttatgaaaaagaaagactgatgaacggcagcttcgccatgaagctcggcgctgttttagcaaatgccgagccgaaagaaagcgctgtcttgtgcgcatttatttcaaaatcagaaagaaccgaagtgccgctagaaaaggcgctggacgcaatcgcgcatttcagcgatgcagggaaaccccttcaagacggcggcccggtccatttttacgtggacggagactttgaaaaaccgataacgggcgtcacagaaatcgaagttttataacaaatcggcggcgagctgtgcaaggccggatctctcacctttcacaagcttcacgctgccggagacggtttgttctttaaaccgttctaccacataagcaagtccgttgtttaaactgtctaagtatgggtgatctatttgctccggatcgcccatcaggacaattttgctgccctctcccacccgagtcaaaagcgttttgacctcgtgcctcgtcaaattctgagcctcatcaataataataaactgatccggaatgcttctcccccgaatgtatgtcagcgcctccacctgaatcgatccgattcctgccaaaatcgcttcaagttcacccggctttttcgcattgaataaaaattcaagattatcaaagatcggctgcatccacggcttgagcttttcctctttttcgccaggcaaatatccgatatcctttcccaccgggacgatgggacgcgcgacgatcagttttttataaataccgagatcctccgtctgcagaagccctgccgcgagagcaagcaaggtttttcccgttcccgcttttccgatcagggtgacaagcgggatatcttccctcagcaggagttcaagcgccattgtctgctggacgttcttcggcctgataccccatacgtgctcatcatcgaaaacgagtctttttacggtctcgcctttcttatctgtcatgccgaccgcagacgaagatcctcctaattcatctttcatcagcacaaattgattcggataaacctgatgctgctgaagctccttgactgaaatttgtttgtctttataaaacgaggcaaaccgctctttattcataaatatatctttgtacccgctatatatttcatcatggtcaacgactctgtcgtttaaaaagtcctccgccaaaagcccgatggcatccgcctttaccctgacaagcacatctttgctgaccaggatgacgaggcggccgttttctttcgtttcctcctcaaggcttaaattttttgccaccgccaaaatgcggttatcattcgttttttcgataaaaatttcttggagctggtgaaatgaccggtggttcagttcaattctgagcgttcctccgctttcaagcggaactttctcgtgcagccttcctttctccctgagcccgtctatcagcttagatacgtgcctcgcatttctcccgacctcgtccatataccgcttttttgaatcgacctcttccagcacgacggcggggatgacaacttcgttttcttcaaaggaaaaaatggcgttaggatcctgcaaaagtacattcgtatctaacacataaattttactcaagtctcagcctcctgaaataaggatcaaagcccatcgtgtgcttctctttccgcgaataacggggatgcctgctaaaatatatgatttggtgcataaagatagaaggttaattcaacaataaaataaatgaaagcattcaaggaggaaatctgacgtgcgaattcttttcattatcatacaagccttgtttatcctgaccggctgcactgctgtacaggacggccgcggccgcaatattcagaacgaatcagccgatcagcgcgatgcaaaaccgatccatgtgaaaaatacggctcctgagacagctgaaaatcccggccggacagacatcgctaagcatctcgtcgaggtaaccgaaaaaatccccggcatttcagatgccactgcggttgtactcggaagatactccgttgtcggtatcgatgtggatgacaatttagaaagaagcaaagtggagagcattaaatacacggttgcccaggcgttaaaaaacgatccttacggcgccaatgccgttgtcgtggctgatcctgatacggtttcccgtctgagaggcatgggcagcgacattaaggccggccgccccgtttcaggcattttggacgaacttgccgccatcgtcggccgtgtcatgccggaagtcccgaatgatgtgaccgacaatgaaaaagaatcaccgactcaatcgaatgatgatcagctgaaccaaagagaccagaacaagctgcagaacgaacagaacgatcaatcggatcatcatatgaaaaaccgccggtaaaaagcagcgcccgctccaaaggaagggcgctgctttctttccctttggcaggaggggcatccatgttataatgcttgtcatagtgaaagaggtgaaaatcaatgagagtaaaatgttccgtttgcgacaaaatcgaacaaattgatgatgaaacactgacagccaaacgcctccgcaatcgtccgattcatacgtatatgtgccgggaatgccatgaccgaatcaaagtcaaaacggaggcgcggctgaataccggacacttttcctttcatcccggacaaaaagcgaaaaaagataaaccgaaaaaataaaccgaataaaaaatgacccgccggaaggcaaggtcatttttttattgcggtttagctgactggctttttttggactggtgcagacggattttgtaaacgatcaaaatcaaggcggcgacaacaagcccttctccgaccggcagaaacacaccgaaaaaagtcagcactgtgcagccgagcacgagaaagagataaactgccgcagccttcaacaccggcagccgtttggcaaagccgagtttaaatacaatcaccgaaagcacgacgatcgttccgtataacagccacattcccgtcagcggatgctcatccacttggtaaagagccgcaaagaacgacagccgttcacttacttcattcaaaaggatccccctccccttttccgttcgggttctaccttttcaaattctgcaagtgattaagacattcctgctgtttttttctttttcgccgctttttcacgttcgtttttattcaggattttctttcttaaacggatggattccggcgttacttcacagtattcatcttcgtttaagtactcgagtgattcttcaagcgacataatgcgcgctttcttaatcgtagtcgtttgatccttcgtagcggaacggacgtttgtctgctgtttcattttgctgacattgacgacaaggtcattgtcacggttatgttcgccgacaatcatgccttcatatacttctgttccgggctcaacgaagatgacgccgcggtcttcaataccttgaattccgtaagatgtcgcttttccgttttccatggaaacgagcacaccctgacgccggcctccgacttggcctttttgcatcggctgatagctgtcaaacgtgtggttcaggataccgaaaccgcgtgtcagtgacagaaactcagtagaatagccgatgagtccgcgtgaaggtacggtaaagatcaggcggacctggccgtttccgttattaatcatatcaagcatttcgccttttctcgcacccattgattccataacagaaccggtatgctcttcaggcacgtcaatctgcacgcgctcaacaggctcgcagcttacgccgtcgatttccttaatgataacttcaggtttagacacttgaagctcatagccttcacggcgcatgttttcaattaaaatggacaggtgaagctcaccgcgtcctgaaacaacccatgcgtcaggtgatgcagtcggttcgacacgaagactgacgtctgtttgaagctgcgcgttcagacgctcttcaattttgcgggctgtgacatatttgccttcacggcctgcaaacgggctgttgtttacgacaaatgtcatttgaagcgtaggctcatcaatgcgcagaaccggcagcggctcatggtggtcagccggacaaaccgtttcaccgacgttgatgtcttccatgcccgaaacggcaacgaggtctcccgctctcgcttcttcaatttccacgcgtttcaatccttggaaaccgaagattttcgttacgcggaatgattttaccgttccgtcaagtttcatcaatgaaacctgctgacccactttcatcgtgccgcggaaaacgcgtccgataccgatacggccgacataatcattgtaatcaagcagcgccacttggaattgaagaggctcttcggcgttatctaccggggcagggacatgttcaagaatcgtttcatacagtgattccatattttcgtcctgctttttcggatccagacttgccgttccgttaatcgcagaagcgtagacgacagggaactcaagctgttgttcgtttgcgtcaagctcgatgaacaaatcaagcacttcatcaatgacttcttccgggcgggcgaaatcacggtcgattttgtttacgacgacaaccggatttaagttctgctcaagggcttttttcagtacgaaacgggtttgcggcatgcagccttcatatgcgtcaacgactaacagaacgccgtcaaccattttcataatccgttctacctctccgccgaagtcggcgtgtcccggagtgtccaaaatattaatgcgtgtatctttatagttaatcgcagtatttttcgcaagaattgtaataccgcgttcacgttcaagatcgtttgaatccattgcgcgttcggcaatattttcgttggcacggaatgttccggcttggtgaagcaattggtctaccaaagtcgttttcccatggtcaacgtgggcaataatcgcgatgttgcgaagatcgtttcgaagtttcacattttcatctcctaaaaaaattagataactttcatattataccacacatcctctttaaaagcgttacgtttttctgtaaactgaaagtatgacgttaaaggggatggaaatatgaaaaaattgaattggctcttattattatttgcattcgcagcagtcttcagcatgatgctgatcggcgtatcaatcgctgagaaaagcgcatggggcatcatcggaagcattgttcttgttatcgccatgatgggaagcggtttcaccgtaaagaaaaaaatgcgcgaacagggactgcttgattaaaagcatgaccctttgcaaaattccgtaaacatggaaagacaatatcttatgaagcctgaatcaaagattcaggcttttttatatcctcaaaacaggctccagatgtaaggcttatctcccccgccgcctagtcaggaagccggaaatgacagctcccattctagttacatcagcagattccctcagaatatgcagtctgaaatagtccggcatcgttatgcagaaaataccatacctcctatttcaattccatcattgtctttttatacttgtggctgtaagcaaatacacatgacaaggagagaacgaaatgaaaacatcttttttgaagaaaaccgctgtaactgccgccgcaaccgcctcagccgccttgcttgcattcagtccgcttgattctgccggcgcaaaaacgattcaggcaaatgaaccgcatgccctggaggcttccgcagagaaaacaccggaagacgcggcaaagcttttagacatcatcagccaatcgatttacgaaaaagacggtgtctattattttgacggtaaaaaagcggttgaattgggattagatcaagaacaagcccagatcattcaaaagctgtgggacagttcaaccgaatttttaaccgtactttcccaatgtattgagaaaacggacggcgaatatacatttaataaagaaaaagcggtggagcttggctttacggaaaaagaggcccttatcgttgatcagctgttcaccgctttttcccaaagtcttcatatccttcaatctgcgctgattgaagaagacggtgtgtatacatttgatcaggaacttgctgaaaaagcaggagcaggaaaaaaagaagcaaagctgtgtgccggattctttaattcactgccccaggaattgcttgaaggcatttatacagcctttcatccggctgagtaaacggattaaaacgcccggtcattcagccgggcgtttttttaaatcagcagtttaaggatcaacatgataaagaaaacagcaccgaacaaacaggctgcttttatcagcagcttcccgtaataccgttccttaaaccgcctttcttcttctgcataacaggctggcgccttcatctcagggctgccgaggtcaagcggctccttcatcatatgatataaactcccgcacttaccgcatgattcaagatgacgggaaataaatcgctccgtttctgtttcacaatcgccttcaatatataaagggagtaaatctctcactaaacagcaagtcatatctgtccgtccttccttttttccgccaagtgctgtttcagctgcattctcgccctgtacagggtgctcttcaccttcgaaagactccagtccaaaacatcagcaatctcttcgtaagacagctcttgaaatacctgtcgaaatgctgaataaaatgactgaaaatctctgacatctgaaacaatccttttcgtttattaaggcctcacccgtttagacaaacggctataaaaaaagttttacagatcggaacatttttcccctatcatttttcccgacttcatttgtcatttttttcagaataaatcgcatcattcgactcatgtctgattcaacacgtgcctctcggcttatcccccgatgccggccgccggaagcctttccgggacgattctatcaattcatcagcggagtctagttttatattgcagaatgagagaatgctggtttattataacaatataagttttcattattttcaaaaagggggatttattgtgggtttaggtaagaaattgtctgttgctgtcgccgcttcctttatgagtttaactatcagtcttccgggtgttcaggccgctgagaatcctcagcttaaagaaaacctgacgaactttgtgccgaagcattctttggtgcaatctgaattgccttcagtcagtgacaaagcaatcaagcaatacttgaaacaaaacggcaaagtcttcaaaggcaacccttccgagagactgaagctgattgaccacacgactgatgatctcggctacaagcacttccgttatgtgcctgtcgttaacggtgtgcctgtgaaagactcgcaagtcattattcacgtcgataaatccaacaatgtctatgcgattaacggtgaattaaacaacgatgcttctgccaaaacggcaaacagcaaaaaattatctgcaaatcaggcgctggatcatgcttttaaagcaatcggcaaatcacctgaagccgtctctaacggcaacgttgcaaacaaaaacaaagccgagctgaaagcagcggccacaaaagacggtaaataccgcctcgcctatgatgtaaccatccgctacatcgaaccggaaccagctaactgggaagtaaccgttgatgcggagacagggaaagtcctgaaaaagcaaaacaaagtggagcatgccgctgcaaccggaacaggtacgactcttaaaggaaaaacggtctcattaaatatttcttctgaaagcggcaaatatgtaatgcgcgatctttctaaacctaccggaacgcaaattattacgtacgatctgcaaaaccgacagtataacctgccgggcacgctcgtatcaagcactaccaaccagttcacaacttcttctcagcgcgctgccgttgatgcgcattacaatctcggcaaagtgtacgattatttctatcagacgtttaaacgcaacagctacgacaataaaggcggcaaaatcgtatcttctgttcattacggcagcaaatacaataacgcggcctggatcggcgaccaaatgatttacggtgacggtgacggctcattcttctcgcctctttccggttcaatggacgtaacggcccatgaaatgacacacggtgttacacaggaaacagccaacctgaactatgaaaatcagccgggcgctttaaacgaatccttctctgatgtattcggatacttcaacgatactgaggactgggatatcggtgaagatattacggtcagccagccggctctccgcagtttatccactccgacaaaatacggacagcccgaccattacaaaaattatcaaaaccttccgaacactgatgccggcgactacggcggcgtgcatacaaacagcggaattccgaacaaagccgcttacaacacgattacaaaaatcggcgtgaaaaaagcggagcagatttactatcgcgcactaacggtatatctcactccgtcatcaaactttaaagatgcaaaagcagctttgattcaatcagcgcgggacctttacggctctcaagacgctgcaagcgtagaagcggcctggaatgcggtcggcttgtaaacaagaaaagagaccggagaaatccggtctcttttttatatctgaaacatttcacaatggcttcaccatgatcatatatgtcttttcccgatcgtctttttcaagcttaagctgttcaaagccgcattggcttaaaaacaaaacccattcctgcctgtccaggggaacggctgaaaacatcgctttatgctcccctctcagccggcccgcaatcttttcaatgaccgcgcgtccgattcctttctcttttgcctccggagcgacggccacggttccgagccacggttttccgtttgaaggcgcccattccaaatgaaaactgacggcggcaggagcgccgtcaatctcccatacgagccacgttccattgtacatggagtatgcaagcataaactccgccgcattttttgttccgaactcttcgtttttccacaccgggtgtgcagccgccagctgctccagaaacccgagatcttcttcttcaaaatctctacctgtcagcatgtaaatagtcgtcaaagataattttatgtattgccggattgcccgcaagcacgctgtggttgtctaaaaacgtaaacggttcgccgtctgtggtcgtgtaaatgcccccgacttcgttcagcagcacgcagccggcagcgtaatcccacggcgcgagcctcatcgtaatgtatgcgtcaatgcggccggccgcaacactggccagctcaagtgccgccgaaccgtaggaacgcgttcctctgacccgttttacgagcggcgccaaaatactcgggtcaatccttctgttttccgtcacccatgtggcattgattgcaataatggcttcttcaatggaagcttcttttaaaggagcaagcggcgtgtcgttcagataagccccttttccgctgaatgcgtgatacagttcgtcctgcatcacatcataaattaagccgattttgccttttccgtcttcaaagatgccgatggagatcgcgaaatgccgcttttgatggacaaaattcatcgttccgtcaatcggatcaatgatccagacgattccgtcaagggagcggagcttatctccctgcccttcttctccgagaatccggtgtccgggaaaagttccctgtatacggtcaatgaaaaagcgttccgtctctttatcaatatttgtgactaaatcattcggatttgattttgtttcaatcgtcaagctttcctgcatggattgtctgattctcgttccggcttcttttacccattgttttgcgatatcatcaatttccgtccaatttgtcataccgtgtacctcttttctatgtatagcttattctatagcatactgataaaggcgatgaaaaagcaaggaaaatgaaaaaaatgccttctcacgtaaaaacgaaccatttcctgcggttcgtttttactattctttatccgttaagccgaatccattcttttctgagacgttccagttttcttttgctgagatcgatttgatcttcattctctttttgcatggcctcatacagggttgccaattcataatcaacctctagtctccagacagctacacggttatttttttcctccctgaatccttccttcaccacttgcctcattgtctttcgccccttccagagatcatttgttaaaaaagcatcccatttttccaatttattaatgatacttcttatatcgtatggaaacttatattcggctgtaacaacattcttaaaattgtgtgtttacctattcgttttttaccaccaatcctctcggctcaaacgttctcaatgtttttgcggccggcggcggctgtggtaaaatatgaatacttacgataaggaggaaaaagatgactcagatgcgttttacaaaagaagacttcgatacatttacaatagaaggtttagatccgcgcatggaggtgttaaaagaacaagtccgcccgaagctgaccttgttaggagagcatttcgcaccgacattgtcagcattgacaggcgatgaaatgtttccgcatgtcgccaagcacgcgagaagatctgtcaacccgccggctgacagctgggttgcctttgccaacagcaaacgcgggtataagaaactccctcactttcagatcggtttatgggacacccatatgtttgtatggtttgccatcatttatgaatctccgataaaagaggaatacggcagattgctggaagcgaagcaggaggacatcacaaaacagattcccggtcattttgtatggtcgccggatcatacgaagccaggggcgtacaagcagtccgacatggatcaggagcagctgaaaacattatttgaacgcctgcagacagtgaaaaaagcagagcttttgtgcggcattcagctgcaaaaagaagacgtgatcaacatgaacaacaatgaattcctgcaaaccattgaagatgcttttaggaagctttcctttttatacacactgactcagaaagtctcataacataaaaagcgggccgattgccggctcgctttgtctacattttgataatcgcttgatctgattgtttcgcctgtttcacagtccgataaggggaataggtgctgtcagcttcaaattggctgcagattttcttttcctccgctttcccgggaacgatttctttaaagcggcggtacgcattcagaagtctgtctcggtcagctcctttttcataggcgttttccacctgctgaaaaaaagcaatgacatccacggcctcctctgtcgtccagtcctcattcatcggatattgatattccaaatgtcttcactcctttataatcatgctcaaaataagcatcttccatagatcataaattgttctttactttctttcaagttcataatataattcatttgttttacgtttaaaaaacgggtaataaaactgaatgtaatacaaactaatccgtaggtattatgataaaggtgggaaaacaattgccgcaacatgaaacacccctgtacagcggactgaaaaagcacgcggacagacagcctgtccaattccacattccgggccataaaaaaggcgcgggaatggatccggaattcagacaatttatcggagaaaacgcgttaagcatagatttaattaatatcgagcccctggatgatttacatgcgccaaagggcatcattaaagaagcccaggatctggccgctcgagcattcggcgcagaccataccttcttttccgtacaagggacgagcggcgccattatgacgatggtcatggccgtatgcggacccggagataaaatcatcatccctagaaacgttcataaatccattatgtcggccattgtattttccggagcggtgccgatttttattcacccggaaattgacgatgagctcggaatttctcacggcattacgcttgagtccgccgagcgggctttgacggagcaccctgacgcaaaaggcctgcttgtcataaatccgacgtacttcggtgtggcagctgacttgagcagcattgtaaagctcgcgcattctttcgatgtgcctgtgcttgtcgatgaagcgcacggcgtgcatattcattttcatgataagcttcctctgtccgccatgcaggcgggcgctgatatggcagccacaagcgtgcacaaattgggaggctccctgacgcagagctccattttaaatgtgagagaaggtcttgtttccaaagaaagagtacagtcgattttaagcatgctgacgacaacgtcaacatcctatctgcttctggcttcactggatgtcgcaagaaaacgcctcgctacagaaggccgcgaccttcttgaagatacgattctgctggcggatcagacacggaaacgcctcaatcaaattgaaggcatccgctgtgtcggcgaagaaatcacagggtctaaagctgccttcagttatgatccgactaaattaatcatttcggtcaaaaacctcggcctgacgggtcatgacgttgaaaaatggctccgcgaatcatataatatcgaagtcgagctgtccgatttgtataatattttatgtattttcacccccggcgacagagcgggagatgccgaccgtcttgtaagcgcgcttacagacatttcaaaacaggcttccgccaatgactatgctcatcagcaaaccgaagttctgcttcctgaaattcctctgttagcgatgacgccaagagacgcgttttacgcaaatacggaagtcattccgttaaaagaatccgcgggacggatcatcgcagagtttgtcatggtgtacccgccgggaattccgatctttattccgggtgagatcattactgaagaaaatatcagctacatttttaaaaacttggacgccggccttcctgtgcagggtcccgaagatgcaacgcttgaaatgatcagagtcatcaaagagcaaaaagccatccaataaacataaagaagcccgaaacgaaatcgtttcgggcctttttacgctttttactcttcttcaagatgacactggcattgtccgcagcatgttccgtataacgtcgtgaccttctcatcctcaaagtaatgaatcgcttcgttacagtcttggcaaacaattgtacccatctgtcattccccatttctcagaatttgaaaacgcttaattttcacttgttgttattatattattatgtcacatttaatatgtcaaccgataaattgtataacacatttattttttacggtctttttatagctcgagggtcaatcacagtatatcctttatgacgcaatccttttacaatgtccggcatggcttccgccgtccatttccggtcatgcatcaatatgttggccccgtcccgcagataaggactgttcagtgtgatatcggtaagcgcttttttggattgatatttctgatcccaatcatacccgaaggtccagttcattttcaccataccttctttttttataagtctgtcactgtagtccgtattgcttccgaaaggcgccctgaaaaatgcgggtttctctcctattaccttttcaaccgctttattgacgccaatgatttcttcccgttgtttttgttcggaaagatcttttaagttttgatgagtcattgtatgattaccgatcataaaacctaactcatgaatatgcttaagcgctttcttattttcatcttttttcaaaaaatgtccgtttacaaaaaagatcgctgacgcattgagatcatgcagtttgtccgcaatctcagcggcatgctgatcaggcgcgtcatcgatcgttaccaatgcgatcggttttttctctttctgttcatccattttttccacagcaaagcttttcggattgatatagtaacggggctccgccttctgttttttctgtttttcctcttttgtatggtggttttcccgtttggcatgattggccgcggcttgagaatggggtttgtttgtttgcatcttttcatttgattggcagccggcgagtaagcacatacatatgacggctgcagcggctttatacatgacaatccctcctgatatggttttgctcccagtataacgaaaaaacagcgctctcacgaaaaacaatgtgccttttttacacatcggctgcgcaagttgtcacacgtattatttcttcattaaaaacggtttcaattatataacaattcagtaacaagccttaggtttttcacctctcgtgatacacttgatatagtccttataaatggatgaacccatatattatataaaacagaggagtaagatagatgcgctaccgtacggtgattcccttttttttgatgctgttcgttctgtcaagctgttcggtttctactgtcagtccattcacaaaaaaccggatcgacagcattcatcacactcaaatcttgtttttttccgatgaaaatcatatagataaagaagtgccttattacgatgcgattcttgatttagaaaagaaatatccccatcatgtcgatcaaatgaaggtttatgacaacagaaagggatgggaagaggaaatcaacacgttccctgcgctgatggtgatcaatcatcggcatgtggtcatgaagattgagggatccgtaaagaaaaaagaggatatcatcaaacctatgcagcatgtgcttgcacaatagaaacagcccccgcttttacaaacgggggctgtttctttgttacattattatttcacgatatggatcgggcttccgattgctacttcggcagcttccatagtgatttcgcccaatgtcgggtgagcgtgaattgtcattgcgatatcttcagcagtcattccgccttcgatcgccaggctcaattcagaaatcatgtcagaagcgcttgcgccggcaatttgcgcaccgattacaagaccgtcttctttacgagtgatcagcttcatgaagccgtcagtttcgttaagagacagcgcacgtccgtttgctgcaaacgggaacttagctgcaacgacttcaatgccttcttctttcgcctgtgcttcagtgtaaccgacagaagccagttcaggctcagagaatacaaccgccggaataccgaggtaatcgatttcagccggctctcctgaaatagcttcggcagcgattttaccttcgtaagacgctttgtgagccaacggaggtccgtcaatgatgtcaccgattgcgtaaatgttcggtacgtttgtgcggcactgcttgtctgttttaatgacaccgcggtcagtcatttcgataccgacttgctcaaggccgagctcatcagtgttcggacggcgtccgacagtgattaatacgtaatcagcatcaaccgttttttcttcgccttttacttcgaatgtaactgttacgccgtcaggtctttcctcaacgcctttagccatggcgcttgtatggatttcaacgttgccttttttcttcagtctgcgggtaacgagagaactcatttgtttttcgaagccaggaagaatttcatctccgccttctaaaataaccaattcagttccgaagttcgcatacgctgttccaagctcagtaccgatatatccgccgccgataacaacgagctttttcggaatttctttaagcgcaagtgcgcctgtagagttcagaacgcgttcgctatatttgaagtttggcaattcgatagggcgagaaccggtagcaatgattgcgtttttaaatgtgtatgtttgcgcagagttctcatccattacacggacagagttgctgtctacgaaataagcttccccttttataacatccactttatttccttttaaaagacctgcaacaccgccggtaagcttatttacaacagaagctttccattcttggacttttgtaaagtcaaccgttacgttctcagcagtgattcccatgtcatctgaatgttttgcattctcgtaacgatggcctgcattaatgagcgcttttgaaggaatacagccgacgttcagacaaacgcctccaagagttgctttttcaacgactgttactttttgtccaagctgagcagcgcggatggcagctacatagccgccgggtcccgcaccaatcacaagagtatctgtttcaatagggaaatctcctactaccataacattacgcctccattaaaataagttgtggatcgttcagtaaacgcttgatgtggtttaacgcattttgtgcagttgctccgtcaatcatacggtggtcaaagctgagagaaagagctaagacaggagcagctacaatttcaccgtcacggacgatcgctttttcagcaatacggccgataccgagaatcgcaacctctggatggttgataaccggtgtgaaccattggcctccggcagaaccgatatttgtgatcgtgcaagaagcgcctttcatttccgcaggtgcaagcttgccttcacgcgcttttgtagcaaggctgttgatttcatcagagatttcgaaaacggctttacggtcggcatttttcactaccggcacaagcaggcctttttcggtatccgctgcaattccgatgttgaagtaatgtttttggatcacttcatctgttttatcatcaatagatgtgtttaaaacagggaattttttcaaagcggatgttaatgctttgacgacgtaaggcagataagtcagcttgatgccttgatcagcagcaacttgtttgaactgtttgcggtgagcaacaagatttgttacgtcaacttcatccataagagttacgtgcggtgcagtatgcttagagttcaccattgctttcgcgatcgctttacggataccgctcattttttcgcgtgtttcagggaattcgccttcaggagcctgagccgctgcaggtttagctgtttcctgaggtgcagctgtttcttgcggtgccgcttcttgagccgctcctccatttgcaaagctgtcgatatcttcttttacaacacgtccgttattgcctgaacctgttactttacggatatccacgcctttttcacgggcatatttgcgtacggaaggcatggcgatcacgcgtttgttcggatcagcttccgcttggtcctgctgtcctgctccggtttcttttgcaggctctttaggagtctcttctttagagatatcctgccctgcttcagcagacgactgaacttgagcctcagttttcgcctctcctgaatcatggcttcctttaaattgaagatcttcgtaaccaggtgcgtcaaacgtaataatcgtttgtccaacagttgcaactgttccctcttcaacttttaattctaatacttttcctttaacaggtgaaggaatttctaccactgctttatcattttgcacttcagccagaacatcgtcttcttctacctcgtcgttcggcttaacaaaccattttacgatttcgccttcgtggataccttccccgatatccggaagtttaaattcaaatgccacagttttcgacctcctagttgattaagcaaattttagttatgcattcgcaagcattgaacctagtaaacagactccttcatataagagaaaaggactctctttaccgtcttttatgatgcctgattaaaattcaagaacttttttcgcagtttcaagaacgtctttatggtttggaagccatacgctctcagcaagcgagaaaggaaatactgtatcaggcgccgcaacacgcagaaccggagcttccaggctcagaatcgcgcggtcattgatttcagctacaacgttggcagcgatgccggcttgtttttgagcttcttgcacgacaattgcgcggcctgttttttcaacagaagcaataatcgtatcaatatcaagcggacttacagtgcgaaggtcgataacttcagcagaaacgccttctttttcaagctcttcagcagccttaagcgactcatgaaccatcgcgccgtatgtgatgatagaaaggtcagtaccttcgcgtttcacatcagctttgccaagctcaattgtgtattcctcctcaggaacttcctgacggaaagaacggtaaagtttcatatgctctaagaaaacaaccggatcattgtctctgatagaggcaatcaacagtccttttgcatcgtaaggagtggatgggataacaactttaatacccggctgctgagcgataaggccttccaaactgtcagcgtgaagttcaggtgtatgaacccctccgccgaatggagaacggattgtcaccggagaagtccagcgtccgccggaacggtagcggagacgagccatttgtcctgagattgaatccattacttcatatacgaatccgaagaattggatttccataacaggacggtaatcttgcaggcctaaaccgagagcgagaccgccgataccggattcagcaagcggcgtgtcaaatacgcggtcctcaccgaattctttttgaaggccttcagttgcacggaatacgcctccggcaacgcctacatcttccccgaaaagcagaacgttttcattgtttttcagttctgtgcgtaacgcatcagtgatcgcttgaatcattgtcatttgcgccatggcttacttcgactccttcgctttgtaaatttcaagttgttctttcaagttgaacgtcggctcttcaaacatattctcaatcagctctgttactttcggttttgattcgccgtcagcctttttgatagcttgtttgatttcttctttggcctgttcaatcactttgttctcttcttcttcagaccatagtcctttgttttccaagaacttgcggaaacgtacgagcgggtctttttgctcccattcattttctatttctttcgtacgatatttagtcggatcgtcaccggacattgtatgaggtccgtaacggaatgtaagagtttcaatcagagtcggaccttcaccgttaattgcgcgctggcgtgcttctgcggttgcagcataaacggctagtgcatccattccgtctacttgaacacctgtaataccgacggcaactgctttttgggcaattgtctgtgcggatgattgcttttctacaggagttgaaatcgcatagcggttattctgaacaacgaagatcgctggcgctttaaatgctccggcaaagttcattccttcatagaagtcaccttgagaagctccgccgtcaccagtgtaagtaatagctaccgcttttttaccgcgctttttaagacctaaagctacacctgcggtttggataatttgagcaccaataataatttgaggtgataaagcatttactccctcaggcatctgattacctttaaaatggcctcttgagaacaggaatgcctggtgtaaaggaagaccgtgccaaatcagctgaggaacgtcacgataacccggaaggataaagtcgtcctgttcaagggcgaagtgtgatgcaatttgtgaagcttcctggcccgctgtcggtgcatagaaacctaaacgtccttgacgggaaagagaaattgaacgctggtctaaaatgcggatatacaccattcttctcattaattcctttaactgatcatctgaaagatcaggcattgcgtctttatttacgacttctccttcagcatttaaaatttggaacgtttcaaactgcttatgaatagcatcaaattgttttttgctatcaacaattgaagtttttgtctttgcagccattttttaaaccacctcttcttttgatttaacagggttaggataccgtttagccatccgtattaaaaacagtcttatcatgctctgcaattctaaaattaatcattcagaaattcacatagcgcttaagcaaagataatgacgtttaaactgtactaataaaaaaagattttttattagtacaatatgatcaacaaccatagtttacagtaattaaacaaagccgtcaattatttataacctcattttgaaaccgcttataaaacataagatcatattgcgccaaactgtactataaaagactttaaactgtattataaaaatgctctactgtactataattaaaaaaaattacaaagagtaaattaagttatttaacttcagggcgggctttgaaaagatgccgcgggataaaaacgggcagttagcaatcgtcccgcctgccgaacagacgggacgatgcttttgtctaattattcaatacccgcccacacgatattcagcggcgtcagcacggcatgaggatgaaactcggaaatcggagtgaaaaatacatacgtaaaatcttcggctggatcagaaaacatgccgcaccaacccattccaagatgtgagaaggtgccttctgtcatgaaataatggtcaccggccggccacaaattaatgcctaaaccaaagccgccttcctctctgggcgctccgaagaagtaaaaaggaagaccgggctttatttgatttctcagcatcgcttcgactgtttttcttccaagcagcttcttatctttcaatctgcctttatttctaaacatttcagctaacttccaaatatctcgcaatgaagagtacagaccgcttgtcgctttattcggaaaatacgggtgatgacttttttccagctgtacgcactcgtgctcattgatcacacaaacttcttcttttaaagcatcaggcacataaaaatacgttctttctaatccgagcgcttcaataatatgctttgttacatactgttcgtaggatacgcctgttacttttgaaataatgatgccaagtataacaaagccggttctggaatagttccatgcttcatccactccgtactccaaaggcgtactgaccagatagtttatccattcttcctcattcgttaagtcaatgccttcagccttttgaatatccagctcaaaacttaatcccgccgtatgagtcaaaaggtgcaaaattttaatttctccgaaacccggtttatcaaacgctggcaaaatgagcttgaccggcattttcagatcgagcaaacctttttcgacgagctgcatgacggctacagcggtaaacacttttgtcaaagaaccgatttctctgattgtatcaagctgaaatgtttgcttttctttttgtccgccggtaaattcccctaacgactcagctgcaaaaacctcacctcctcttgacatcatataactcgcacattgcagatctccattgtctatcatcgtctgataatggccgttaagagcgttaatttgtttcatatcaaatgccggattgcttattgtttgtttcattgttttctccccctgtactgtatgtatcgttttcatcccttacttactgatttcttgatgaattctgacaccgttttattaaattcttccggatgtgtaatgttcggaagatgccccgctcccttaattttctttaattctgcattgctcagcagtttctgcagcctttttgtttctttctgatcaactacgctttctttctcacccgtaaggataagcgttcttgtatgaatgtcttttaaaaagccgattgtagaatagccttcttgttgatgtatcttcataaaacgttcaatagaagcatttaagaattgattactgtataaactttcatattcatgcgactttcctatagctataaaatcatttttcagtttttcctcgacactgctttcagggtcttcttcgtattcggtgtaacttccggaaagaatgagcgtttttactttttcagggtattcataggctatcctctgccctatcatgcctccccaagaagctgccgcaatgtggatcggccaagcaacccctatctcgttcagcacttcgataaaagtctgagccagcccgctcagtgtaaaatcggcgctcccctcactcagcccgtaacccggtgtgtgtatgacaattacattaaattgatctgcccactccttcatttgttctttccacatgtaagcagtggtagcaaaaccgcaaatcagtaaaattgtttcacccttaccgctcatcaatatttccatatgccgggcattttctgtgtttgccagaaaatgaacggtttccgtttcttctgtctggtaaaaagcgatgagtttttttgcggcatcgctttgattgtgctgaagggctcctttcttcagtctgctccaataatgcaaataatcgtcgagatgacgattggaagccgtgccgagtattcggaaaggactttcagcttcttccgtaacgactgatgaagcatcaaaatcggctgcaatcgctgaatctcttaccagaggcggtgctgaacgggcggataacggcttgaaatcgttttgtattttttctttttctccgtataacacgatcagctggtggccttggccgagaagcgagtgttcaaaagctttgattccggcagtattttctaatgggtgaagtccgtactccgttttcataatgtcttgaatgccgggatcaactgacatgcctccgtctttccagaaaggccaatttacagcgatggtttttcctgatcttccccccgcctttctcatacattccctccactcggcaaaatgctccagaaaacgattggcgtaggcgtaatcggcttgacccagacttccgatttctgaggagatggaagaaaacaaaacaaaaaagtctaaaggcatatttctgagcgcttcatccaaatgaatcacaccattgacctttgattgcagcaccgcttgagcttcctcgtctgttttattcataatgagagagtcttttaacacgcctgcactgtaaatgaccccgttgatttcggaataatcagcatgaattttttccgctaaattgatgacctgctgcttatctgacatgtcagcctggatataagaaatgcttgccccgtcatatcggatgctgtctaatttttcttccatgtctgctgtcattttcgatcgcccggcaatgataacgctggctccgtgatttgcataaagaaacgctgaaataatccagccgatgccgcttaatcctccgatgatgagatacaccccgttttttgcaaactttgcggccttttgccctggttgcagcgaagcgtctttatatgctgtcacccgccttttttgatcgccgtcatatttcacagactgatgatgtccggcacttaattcattgagaagcaaaggtgctttttcaatggtttgtcttgaagaaatctcaaccgttttacactttatattcggctgctccgcattcagcgttttaaaaaagcctccaatcgcggcgtaaaccggatttgtatattgacccttgtcatgtacgtacagaatgttgatgttttcttttactttttgatggatcaaagctttactcaaataaagaattgaataaaagctgtgagtcagatctaacgctgcctcagtataagctttttttgacaggtaatgaatgattgacgccggaaacgctccggactttttcatatcttctaacagtctggtgtaatgagcagactgctccggattaaatttataatgcttttcatttactatttcatattcagcggcggcttccgcataaataacattttcactgccgatgtactttcggatttcatcactcaatgaactgccgaaatcgaaaatcagtgtattttccttaggtacttctccggactttaatggcgattctatccattctttttgtaaatacaaggaatcaagcaccagcttttcagacggctctttcgtttgcgttttttctttaaaagctgcggccggcgtattacgcacatcatatttttcttctaaataagccgctaaatcatgaatattgttataatcaaaaagcaatgtcggatacaattgtgtatccaatctttcctcgagcattttcgatatatgcagcagctgttttgagtcaagacccagttcgtaaaaagattggtgtttgtccgctttatttgacggtgtgtttgtagcctctccaataatggatgacagctcatctgttaatgttttatgactgtcttggtgctgaactgtatcagtgatagagtctgtaatgtcggctccgtatttctcctgcagatattccgtcaattcaccgattgtggagtaatcaaataataaagtcgggtacaactttgaacctaacatcagttctaattttttggataagtctaataattgtttagaatccaagcccatctcgtaaaaggaaatatcattcttcactgtttcagcaggtttttcaatcatgccggctatctcttggatcaaattatttctgatcatttctttattgttcgttgcgctgccgacctctttagctttttgggaatgctccagcctttgtattgaattttcatttctgactcttttcacaccgaatcgctcataataaaaagcaagctctccatcaggcctgtatacttctatgtccgcatataaaatgtctttagaaggcggctgcgttatactggttttattaatatacacaaaacaagacccagttgttttatgcagtgccctgaatgtctcaatatatatagggataaacgcatttgttccttcatccggcaagtctgatgtaaggattcccaacaagctgagagacccatccaaaaatgcgggatgcatgtaaaagtcatctgtatattcttttgaaagtccgcttaaactgacctctcccagaatataattttcaccttcatataccgtaccttccaatttcataaaatctttatgaatcaggccgcccctgcgcaaattacgataggcggcttcagcatccgaaatccggacggcccctttctttaattcttcgattgaaattgtcttttcgtttatcgcattttttcttatgatttccgcctgcaagttgactgacgcttcaccttccgccttttcagcgacccatttcctgcttgttgtttcaataagccagccgttttcttgttccgtaaactggaaggtgacttttttatcaaaatggactgacgtcgcaacaggttcacggaataaaacatgtttgatttcaaaacttcggggtgatatccctttctcagctaaaaatcgtgttattaaatccagatacgttacgccgggtatcgtacgcacttgatgaaggacatggtctgaaacaatataatcgtcatgtttgactaatacgctgaacctcatgcaactcgacaacctttcttcttttacaaagtaaagaaacagagcaggtgctactctgtttcatcaataatttcaagaagccgttttttattctgtttgatttgttttttccgatttgaatccggccagtactcttttctgacaaactcggcaggcggcagcggagttctgacggaatgatatgaatcatccaggccgcttaccaaaaggtgggcgtttgttccgccaaaaccgaaagcgctgatgcccgccctccgttttccatccttccagcttctcagctctgtattcggataaaaaggcgacttttcaaattcaaagcggggatttggcgtttcacaattcaatgtaggcggaatttccttatgccatattgataaaatcactttaatgaaacttgccgctccggcagcgcttaataagtgtccgatattggtttttacacttcctactccgcaaaattgcgttttgtttgtgtctcttcggaatacttttgtcagagcctgaagctcaatcggatctccaatcatcgtgcctgtgccgtgagtttcgacgtagctgactgatccgggagtgatatcggctttttcaaatgcatcttgaataacctgctcttgaagcttaggattcggggtcgtaattcccattgtcgcaccgtcgttattaatagctgatgcttcaatgataccgtatatccgatctccgtcagctttcgctttctccagcggttttaacagaacagcgccaaaaccctctccgggtacaaaaccgtttgccctttcatcaaaagtaaaacactgaccgtccggcgaaagagctcctccttctgttaacatcaggtaaggaatttcatccaaaagcagatccgcccctcctgccagcgccatctctgaatcaccgttttttatgctttggcaggctaaatgaatgctgactaatgaagaagaacaagcggtatcagaaaccatgcttggaccgtgaaaattaaagaaatgcgacacatgtgaagcaataaagttttgactaagcccgacgatgtggctgctgctttctttcggcagtttgtgaccgtagccgcccattctggaaccgacaaatacgccgactttttttcccgataattccgtttcttcataaccggcatcccgtacagtctgtacactcgtttctaagaaatgtcttatcagcgggtccgtttggatggctttctcctcttccatgcggaaatactccggatcgaagctgccgattccattgataaatcctccccatttgctgatgctttttcccttttgctgcaccggagagtaattttcttctatattccaccgggaatcaggtacttctttaatatgattcttcccttttctcagattgtcccaaaattcctctttatcagccgctccagggaacttacatccgattccgataacagctatctttgcagaggaagccgtctgcggttctgtatttcggctcgtcacagactgcatatcttgctgattgctgctttgagaatcagtctgttcgacttgttttttcaacggcggcgccgtcttaccgatatattccgcaagaccatgaatcgtgttgtgttcaagaagcacagtagggtcaatttttttctgaatcattgcttctattcgatgtataatgctcacaagtagtatagaatccacaccgtattcctgaaaatccgtatttgggttaagcttttcaaggggaatgctcaattcctcggcaaatacggcagaaagttcactgacaagcccttctgaatgatcaaaagtgtcgggagtctcctgtcttcggactggaaccgaagctccgccggttttattgatgttcaggagactgtctgcatgaaacactgttccttttttcacgataggaatgatattggccgattttctctccagtgcatgatacaaaatcgccagtccttcccgtgtggatagagagtccagtcccaattcatcatataaaggactcgtcacagtacccattccgacttctttccagctcggccaattgatggacgtgaaatacgttctccccttttgaaaatgataagccgcgaaatagtccatatatgcgtttgcagacgcgtaatcagtcattcctttcgacagtttgggtgactgtgctgcaattgatgaaaatagaataaagaaatccagcggcctattattaaaaatccgctccaaattctgaagtccagtgactttcggcccgtacaccgtcttaaattcactcattcttttatgaataaaggccggatttccgccgctgtgcagtccggcacagtgtatgacaccgcttatatctttaaattcaaggcttacttggtgaaagaatgaacgcagcttctcttcatttgtgagagaaccgctgtaatacatatagttgacacctttctcttcaaaactttgaaacagttttatattgctgactgtcttttcgtcctgtctgccctctttcagcaaatgatcccattcacttcgcaaaggtaatggacgcgtacccgtcagcacgagttttttcactccccgtttcaccaaatcttcagctattgctctgccaatgccccctgtcccgccggtaatcacgacggctttatccgcaggaaatgaaacaggcccgccggtatggattctttcttcttcaaaatacggaacatatctgacgccgctgcggtagcatacttcattctctccggtacattgcctttcattcttaaagatttgtttcagctcatgcgtttctttcatgctgtctatatctattgttttcacatgaacaaagccgtattccgcagaaagggctttcagaaaagccgctgattctgcccccgtcagctttggtttttccgctttaaatacctgcaagccattggtgatttgtaaaatggataatggtgtttcctttttactccgcttaattatttcttgtataaataagaatttacaatatgggatgccgttctgattgtcactctggtttccgatatctgagaaatcaaatatattttcgaccagccgctcaccgcccgagaagatctcacggataacgtcgtatgcgtggttttcatctaataaagaacactcaaacatttgatcagagtgttttataaatgaagagtgatgtttgatgacaatcagattctcctgatctatatccgaacaaatggagcgggcaattgattctgtgtcttgatttacaaatgctactgtcagtccgtactcttttgtttcggatggatttacaaacggattctccctccattttttttgcaagtgatgttgaaaagaatgctgagggatctctgtcttctcagtcctggacggaacccaataacgttcttttgcaaacggataagtcggaattgagatccgtttacccggctgctgtaaatgttgatgaacggatttccagtcgatatccgccccccaaacccataattgagccagcttttccgcttcaccgttctcaataatggtctttacaaacaattcacctgctctgccttccgttaacgccttcattttttcagcaaatgcatctgctgattgctgatgaacatatacgcctggaacttgcttgtcaccgcggcaaaactcaaataatttatctttcatttctttaagagaggtaccgataatcgccgctctggcctccatcgcttctctgcccgattgtgtagtgtatgccagatcccgtaaaacgacgctttccgattggctgccttccatcacttcattcgggaacaggtttcttatcgctccggcatattccttcaataagtattcagtaaccgcttgaatggaggggcaatcagttaattcatacatcgtgagttcaatatgaaacatttcgttaataaaatccgccatccggcttaattccaaaggtcctacgccaaattcactcaggtgatcagcaatattaatttcttccggatggatatgaagcaattccgaaacaaacggtttgagtacttcatacaccttttctttcatatcaggctgcttatcctttacttcaggacttagtgaacgctggataaaatctctcatgttttcggcatactcaagaagacgttcattgtctttggcagataacaggacaatatgcggttcgttctcaacatgttctgttgagacgtttgtttcttcatattcttctataatgatatgaacattcgttcctcccgctccgaatgagctgatccccgctcttctcggaacagttactgtttttccgttttcctgcagtttcggtttcttccaatcttgcaatgaccgctgtacataaaagggagaggctttaaaatcaatatttggattcaacgtctccgcatgtatggaaggaaacagttttttcagtttcatttgcaaaagaacctttgtcaaaccggcaattcccgctgcggcctcaagatggccgatatttgatttgacagaaccgatggaacaatattgagtgtgctccgtaaattcccgaaacgcttttgttaacccggtgatctcaatcgggtctccaagagaagttcccgttccgtgagcttcaatataactaattgtacgaggatcaatacaagctttctgaagcgcgtcctgtatcagttcagactgaccatttggattaggaaccgtaaaaccgtttgttctccctccgtgattgaccgctgtcgctttaatcagcgcataaatatgatctccgtcccttaccgcttccgccgccggctttaaaagtacggatcccactccttctcccggtacataaccgtcaccgccctcgccgaatgtccggcatcggccatcacttgcaaagaagcggctttgatttaataatgtatatttattgggatgaagcgtaagattgaccccgcccgcaacagcaagtgtgctttctcctcttcgtatactttcacaggctaagtgaatggcgttaagagaggatgaacacattgtatcaaccgccatactcggccccttaaagttaaagaaatacgatattctgtttgctattgcagaaaatggagacccgacggccagttcatttcctttaagtgattcttcaacgccgaaaaattgatagcttccatatgtgacgcctgcaaatactccgacctttttgcgggtcagatctgaaggtttataacccgcatcctctatggtattgtacactgtctctaaaaagagacgttcctgaggatcaagaaaagccgcttctttcggtgatatccggaaaaataaaggatcaaaccggtctggatttttcagaaaacctccccacttatagcagcttccctccagcatttctttccgatcatcaggaatttcgcttacgcaatcccgtccattcatcagcacattctggaactccctgatgttttccgcacccgggtatctgccgctgacaccgataatggctatatcagcagaaaggggatcggccgcaatgtgctcttttgaaccttctccttcagagcgtaccggcgcttttgtttccactggttttcttttttgctttttttgatatgagacaagttcagatgtgccggccggtttcagcagtttcatcattcgttcgctgtgatgactcaggaaatattcagctaactgagatattgaatgatattcaaaaaataatgttttcgacaatctgccgatactttgctccagctttttggtcagacgcatgatcattactgaatcaatgccgtatttctccaggtattgtttttcatctatgagtgagaccggtaatttcaattcctctgacattatatttttcagataactgatgatattttgtcttaattcatcgttttgcaaatcggcatctttctgctggtctgaatgtaagctgattgtgccggcacgcttcagcacatcctcaatcttttcttttcggcctttcagggcaatcagctgttcagatgattgacacaagctgttctccagagcctgtattccgtcactgtcatctaacgggtcaagaccgagttcctgtttcatgtaggatattccttcatcgtcaatattcatcccgccggaagtccatagcggccaattgactgacactatcctttcggcagactcttttgcggtcataactgctgcatactgatccaaacaggcattggcgaaagcatagtcacattggccggctgagccgaagactgccgatgtggatgaaaacaagacaagtaattcaactttcatttttttgatttcttccgccagccacagcgtgccataaactttcgaacctgtgacttgatcaatttcttcttttgtctttcttaagataaaagagtcacggagtacgccggcactgtgaaatactccatgtaaggtgccgaactgctcttttgcaaaagcaaacatccgttcagcatcactttgttttgaaacatcagatcggatatattcaactgttgaacctgaacttcttaaatattcgatctttttctcctgctcttcagttaaatcagagcgccctgtcaatatgagattcgctttccatttttccgacagatgttttgccagaatataaccgagaccgcccaggcctcctgtaatcagataattcccatgatgtttcagcggctgggttaaatcgaatgagccggctttattatagcttttcgtaaaacgtctgccgttttcatagcgcacttcaaaatggatatcccgtttttcgtcacactctctctgatatatatccgctattgctggaagagcggctcccgcaccctctgattgcgtgatattgataatctgatagtgaaaattggggtgttcctggtgaacagttttcaccaatccgccgagagcatgatgcagcggcagttgttctttattctctgtttgaaaaatatgcgtcagctttattatctttttccattttagttcaatcagcgcctgtgtaatatacagaagagaaaacaatccgttttccaattgtttctgtatacctttcttactcatgtcagcctgagaatcagaccacaagtgaagaatcttttcgggcagctgaaaatgatcatgaatgtatcggaacagctttagataatcgtcttttttcacgtggttcatacaaatcgtatcatcatgtaaaacagcaaattcttttccgcggataacaaacaagagagtacagtccttaaacaaaccgctcaattcttgtatttgccgttcattttctgcaaaaatcaggagcaatcccgtcaagggtacgctcttcttactgggaatgaacgattcagtccattccggcttgtaatataaaagcggatggttcgatgcccgtgatttttgattctgaatggatgtcacacgggcatagccttcgtcagccgacatttgtcctgtttgaatcagatcaagaatatcgctgagtagttcacgttttccgttcatcattcttcccccattaattgtttcaatacagccttctgatcaatatcattggtttccaattgacgcaggagacgaatgagttcgtcgtccgtctgaacagtgtctttttcatgaccatatctgaatctcacatctctgcactctgccagaatgcttccgtttttatctgtaaacgtcatatgacacgttacatcacggctgttctgccggttctctttttgagtatagacataaaaattttgagcgagagggtgatagacatccgccgctcccattccgatcaattccgggaaggtttctccgctgacaaaaaacgcactggcttgaatcgcggactcaagcgcttcaggagagatcgtaaaattctctctttttgcataaagctcatccggcaatgaatgaagcgacagcattccgtcactgtttttcgctgattcaatgacaaaaggcgcttcagcaggatgttcagtcatttttgatttgacttcagcaatatcaagcgcttcaggaaacataccgctttcaggcttaacaatatgcgcatttcccctggcaagacgtactttattttcattttttgtgtttgcatatatgtcaaaccgcgcaaagtcgcgctcaggcgtcagcgtaatcatcagttcccgtatatcagtcattccgttcatgctttcggtccacaataaatcagtcaatgtttgaaccggttgtccaaatgccgccgctgcattgacgatagccatttcagccaaagatgcataagggaaaaaggacatgtttccttcagacagacttagtgcgaacggatgattacggctgatttttttcgtgaaactgaactgattaaaatcggacgtgttactccccaagaaagggtgacccggcttactcacatccgctgaaacaagtgcttcccctttttccgctatccaataccgctgtttgatcagcggttgtcccggaatagaaatcctgcgggcattccgattcacctcaaaagtctcccaatctatctttcttccatttacccatttggatgctgcttcggcgtaatctgaacaaacgtgagacatttcattgtgaacttctgattcgaatgtattaccggtatagcttaagctgcttttttcacccctggtataagctgaaagctcttcagcaatgacccgcccggaatctgccactatcgccagccgttcttccatatgatcgcgtcccgtctgaagtgtataggcaatatcctgaagacgcagtttatgtttgttatccttcgattcattttctgatagaaaatcagccataacctttgcatattttatcagccgttgtttgtcttgagccgataaaacaaagatcactcggccgctttgatgatcaaaagcttttggcggctcatacgcttccaatataagatgcgcgtttgttcctcctgccccaaaagcgcttaccccggctctcaaaggatgaacagcattgctgttttgcggaatattccattcagccgctttccgctgcacttgaaaaggaacctgatcaaaatctataaacggattaacaatatcggaatgcagagaaggaacaagctgcttattcttcatttggagaagcactttcgttaccgcagcgattcctgccgcagattctaaatgtccgatatttgatttcaccgaaccgatggcgcaaggatggttcaattgataggaatctttcagtccttgaatttcaatcggatcgcctaatgacgtccctgttccatgcgcttcaatataattgacggtattcggatcaatgtcagctttacgaagtgcttctgaaatgacctccgcctgcgcatccggattcggtatggaatacccgctcgtctttcctccatggttaacggcgcttcccttaatcacaccgtatatttgatcttgatcttctattgcttttttcaatggttttaacaatacggccccgactccctcaccgggaacataaccgcttccgtcttttccaaaactccggcatctgccgtcacttgatagaaactgtcccatactgaggaacttatatttattcggatgtattgacaaattcactccgccggctaatgccatatcgctctctccacaatgtatgctttggcatgcgtaatgaatagaggtcagtgatgaagagcacattgtatccagagccaaactcggaccttttaaatgaaaataataagacacccgattggcaattgaagaatagacggacgccggcgagaaagccactccattttcttctccttcaaatagttgatattggccccacattgcaccgacaaatacaccgactttcatcttttccagcatgtttctcgggtaccctgagtcttcaaaacaatgtttggccgtttctaaaaagagcctttcctggggatccataagttctgcttcccttggggaaatatgaaagaaaagcggatcaaattgatcggctccgctgataaaacctccccacttgctgtaagacttccctttcatatctctgtcttcgctgaagaaatcatccatattccagcggtcaggcgggatttctgtaatacaatcttttccgctctttaaattctcccaaaattcaggtaggttttcagccatcggatactttccgcttaatccgataatggcaatgtcctcatgccttgtatcagctgtttcatttatttggatctcacggctttcatcctctatgaaggtatcttgaagtgcagattccaatttttctttgtcaccttcaaacacgatcagctgtgatgcgttcagagagagtgaatcttgaaaagctttgatcccattggttttactaaggggaaccataccgattttttgtttcatccatttttcagtttgtttatccactttcatgccgccgtcttcccatagcggccagctgatggctactgagacgccggagcgttcttttttccgcctcattccttcacgccactcagcgaaaagatcgatgaaccggttggccaatgcgtaatccgtctgtccgatattcccgtacatcgaggtgcttgatgaaaacatcacaaagaagtccaaaggttcggtttgcagcaagctgtccaataagaccgtcccatttattttcggagcgattacttcctgaatttcatcttttgatttttgaatcaataaagcgtcgtgcgtcacaccggcactgtgtatcacaccgttgatttctccgaatttccttttaatggtttttatgattcgctctgcatcgcggctatctgaaaaatcacctcttatatattgaaccgaagaaccgcctgctttcattcggctgattttgttctttttgtcttccgtaagttcagaacggcccgctaaaataatattggctttcgtttgggctgcaatatgttctgcaaatataaggcctaagccgccggcccctcctgtaatcatgtatactccgttttctttaaaggagaaatctgagtttggagccggttctgcttcccgtaaggcacggacccagcgcacatttccttcataataaagatcggtttctcccggatgcgcttccgtagattcgactctgatgatttcagctgtaagttccggcaacgatgacttgtctgatactgatatcccgattgtcttaagggccagtttcgggttctcaagcacaatagactgccctgcgccatggactgaagcgtaaagcggctgatcatttttatgatccgccggataaaggaaaagcgatacaacctttttttccgtcttgctgcgcatcaatgcccggctgaaaaataatagcgggtaagcccctttagaaagctgttcacttattttttccgggccggcaaatgatccttccggccacccgtacaccacggtgtcgggcatttgccccctttttttcagatcagctgcaagcctgtcaaagtgagcttcctccctgtgatctatctcataaacaccgtctccgtgataggagaaacgattccctgataaaacgagaatgatctgtgtattttcgaacccattttcagcattttcccgcataaaatgaaaaagctctctgtcatattgaaacagcaggcatgttcttttctttttattgctgcaatgcgggtcccaagcggcaggcttttgtctccaatacggcgttaaatatgtcagagccgtatgattctctccatgatgaagagggaggtctttgtcaacgaaagtcttttcgccgctctctgcaaaataatttgcaagtttttgaatcgtcggatactcaaacaataaagtagggtacagttccctgcctgttttctcctccaatgcttttacggcttgcataagtgttacggaatcgaggccttgttcataaaaaccttttacaacagagagtgtttcaggggcagtccctttgatgtctgcgatcagctgctgaatgtctccttctgttataagagcggaaagattttcgttcttactttctttcatgtcaggcttttcagccggttgattttgcgttaagaaataactggacattttttgattttctttaatatacgcggcgagttcccggatcgttttctgctcaaacaggagtgtaggatacagctgttcccctgttttgttttcaagttctttgacaatggcaagcaaagaagctgaatccaggccttgttcataaaaaccaatgtctgtccttatgtcacgcagatctatatttgaaaccccggatattaattctttaaggtgtgtctcgatgctttcgcttcgatttatgattgaatcttttctgatcaggctgtcttttggctgagaagccgcttcagtttccaaacgagtctgcttcaggttttcaattaaatcttttgagcgaatatgtttcacagacagccgcgtaaaataagcgatcatctccccgtatgcatcgtacaaaccgtaacttacttggatgacatcccctgaatcatgattttggtcttgcttctctatgtacacataacacctgtcttccaggcgcttcgtcatacggaaagattcaatatgaatgggaatatacgttttcatccggcttgccggagatccttgtgtaaaatattcgggacatgcctgataaaggatcgatatgatggtagacgcatcaagaaaagtgggatgcaattgaaaatagccggtatattgattggcaatttggctgagcgttaactctgcaagtacagaatgatcagacgcataaaccttccccagactcttcataaattcaaaatgctctatatcaaccttttttaaatagtcataacatatctccatatcatcttcacgggcggaggcatgtttaatttcatcaatattgattgaactcatgctttccgggaatttctgcatgagcctgcaggtcatattctcatcccagctttcatccagaatgcggtcatcttttacctttctgctcttcgcctgaatttcccatccctgttccaatccctgaaaacggatgcggatttctctgtcaaaggtatccgatgttgctacaggttccaaatacaaaatattctgacactcgagttcttcaataggcaaacctttgctcagcgccatacggtatatcatatctaaaaatgtgacaccgggtataatccgggtgccatgcacccggtgatccctgacaatatagtccgtatgtttaattgttaatgtgaactgatagttttgattactggccacctgtctcattccttttcttttctttataattctttgaaatcaagtaaaggaatcagcaattctgactcttccttttctggagtttctccattgtcgatccagcattgttccttattgaatataaccggagaaagcgggtgtctttttgtctctccatatcctaatgtgagatggctgtcgctcaatatcatatgtgcgttcgtgcccccgaatccaaaagaactgattccggctctcaaaaccccttttctgggacgccattcttttaaagacgtgttcggaaagaatggcgactgatcaaatttaaaacgcggatttggcgttttacaatgtaatgtcggcgggagcatctgattttttatggataaggcaacctttataatactcgctatccccgctgcgctcattaaatgtccgaaattcgtttttacgctgcctactccgcaaaattgcctttcttccgtaacctcccggaacacttctgtcagcgcttttaattcaatcggatctcctatcatcgtaccggtgccatgcgtctcgacataactgagagtatctgcatcaattccgccttttttcagggctttttttatcactgcgctttgcgctttcggattaggtgttgtcattcccattgtctgtccgtcattattaaccgcggatgagtcaattaccgcgtaaattctgtcaccttcggcaagggcgtcatcaagtcttttcaaaaggactgcgccgcatccctctcccggtacaaatccatctgccttctcatcaaatgtatgacattttccttcaggtgaaagcgcccgagcctcactcagcatgacgtaaggcttttgatccagcaaaatgtcaactccgcccgcaatcgccatatctgactcttttgacatcaggctttgacaagcgagatggacgctgaccaatgaagaagaacaagccgtgtctacaaccagattcggtcctttcagattaaaaaagtgtgagatatgcgcgcctatgaaattttgtcctatacccacgatcgtattttttgaaggggaacctattttggacataaacgtcccggtccgcgaaccgatgaagacgccgacttctttgtttgatacttcttcttttgtatagccgccgtctctcaaagtctggacgctgacctcaaggcattttttgattaacggatcaagctctgatgcctcacttttgttcatattaaaaaacgcgggatcgaaagactcaatatcttgaagaaatccgccccacttactgatactttttcccttttcataggtgtcagagtagtatgaagaaatatcccatcgcgacgccgggacttcgcggacactattttgtcctttcttcaagtttgtccagaacgtttctgtgtccggagcatccggaaactcacagcccattccgataatagcgatttggttcagactggtttgttgtatttgagatccgctgtcccgtacttcggaagcattttgatttatatgttgctcttttttccgaacctcaatgttttctgaatcaatttgaggactgattccctcacttgcaaataattcgtttaaatagacgcccagttgtgaaaaactcggatactccagaaaagctgatggttcaatttttatttgaaatgcatcttccgcttttttgacaagctgaaccagtaagattgaatcaactccgtaatccgcaaaagacgtatcctgatctaaattctcataaggtattttcagctccgcggaaaaaatctccattaacttcctgatcatagcttcattgtctccctgaccagagatctctttttcttcagcatccgggttatttttagcagcttgaattcttgtctgaagcagctgctccagcttgaatttctccggatgtgtctttgccggtataaggcaggggtatccgtttatcgtcatcatttcatccagcatggcaatacctgtttctgttgagtgtgaaagtaaaccaagtgcctgatatgatggactggtcacctcgcccatcccaatgtccttccagctcggccagttaattgattgataatacgttctgccggctgcatgctgatacgccgcaaagtaatccataaaagcgttcgctgcggcatagtcacttgttccggcgcctaataaaggaaaggcgctcgcaacagatgaaaacaaaatgaagaaatcaagtttgtcatcaataaaaatgtcatgaagtacctgcatcccctgcacctttggctcaaatacttctcttatttcttgatcagatttatgaataaaagccggattcgaatgattggctgcaccagcgcaatgaatcaccccgccgattttgccgaacttcagtctcacctttgaaaagaagcgttgtaatgtttctttttccgtgagcggcccggaatacacttccacctgaactcccttttgatccaactcatgcagcagttgtaatttcgaataaagaggtgacttttcatcggtgtcttttaacatgccggctattttatcagattccggaaggtcggttactcccatcaacacaagttttttgactcccttgccggcataatgtctggcaagttctgctccgatccctcttgttccccctgtaataaccagggtttgatccgtacggcatactggcagaccggatagtttccggtttatttccgttgcatgtaatttctcgacgtatggaatataacgttcaccgttccggtagcagatttcactatacagcccgtcagcgcaagcttcatctgtgattacctgtctcaattccgccgcagtcccgacatgcccgtctacatctattgtttttgattttatcttttgatactccgcactcagcattttatatagtccggctgtttcggctccggctaacgacggcttgtcattcagaaatgtctgcagccctctggtcacatgtaaaacgaaaagctgtttacgtgtctttatgatttcctgcagcagtgtcagcttcccgattgtgccggtgcgtaccccgttttgatcactccgcaaatctgacaggtcaatcatgccgatgatttccggattttcttctatgactgctagggccgtttttttggcttctccatccgaatgatcccagttatctgcgcaaatgacagcggattcaatcagaggatctgaatcaaacaattcgaatgcaagccgctcactttcactattagccaggatcatcacctgtcctttcgtaaaagcggaaggcgcagccttttgttttttccacgctttttttaatacatcaaatgataagtcagtcggtgcatggggcaaactttgcggtacacctgtttttttctgtttctgtgctgcttttgcggcaggcacccaatatctgttccgttcaaaaggatatgcgggaagagagataagcttcggtaattccgcagtgtacatctcttcccattgaacgtctcctccgttcacccagtgaatggccatttctcttgcacttttaaagcgggcggctgacagggcatccttttgaccagcgtctcggcgggcctttcccctatataaaccgtttaacttatgatctgaccgcaaatacatcgtcagcttattgcgaaggtcgtcaatgctgctagcctcaacagcgagccgctcttccatagcgtttctcccggtctgcgaggtgtacgcggcatcggctagtgacgtttttggctccagtccttttatatatgcatcaatcaagagtctgagccgttcttcatttttggcagaaagcagaataatttgcgtcttgttgctctgtaccgtttccatcttttcttcattcttatactcttcgatgataatgtgggcattagatcctccagcgccgaacgaactgatgcctgaccttctggcttgattttgcggcgtctcccaatcggtcagttcagactgcacgtaaaacggtgtttcctcaaaatcaatattaggatttaagttatcggaatgaagggaaggagcaagctgtttatacttcatttgcatcagcacttttgtgatagaagcaattcccgccgcagcttctaggtgtccgatatttgacttaaccgaaccaattgcacaactataatcgcttttcgagctgtgcaaagctttggttaaacctgaaatttcaatcgggtctcccaaagatgtcccggtgccatgcgcttcaatataacttatgctgtctgcatcaatccccgccttatcaagagtttcactgatgacgtttgcctgctcgcccggatttggcacagtgtatccgtttgtttttccgccgtgatttacagatgttcccttaatcacaccgtaaatcctgtccccgtcagccttcgcggcagaaagcgatttcaaaagaacggccccgactccttctcccggcacatatccgtctcctcccgctccaaagcttctgcagcgcccatcgcttgaaacaaaatgattttgggaaagtaaagtatatttatccgggtgtaaagataaattcacgcctccggctatggcgagggtggattctcccctttttaaactttcacatgcaaaatgaacagcagaaagtgaagaagaacacattgtatcaattgcaaggctgggtccgtgcaggtcaaagaaatatgacacccggtttgcgatagacgaataagaagacaagagcgcctgacgttcctcatcatctgaagcaccggctgcaaataactgatagtggctgtaggtgacaccgacaaatacacctgtcttatgccgtttcaactttttctttgtgtaacccgcatcttcaaacgtgtgccatgctgtctctaaaaataaccgttcctgaggatcaattaactcggcatcacgaggcgaaattgagaagaacagcggatcgaatttatcagcgtcttttataaaacctccccatttgctgtcatgacgggcattgtcacctgtgtgataatatttccgaaaatcccagcgctctttcggtatttccgttatacaatcttttccggaagaaatattttcccaaaactcttccacatccttcgccatcgggtagcggccggctataccgataatcgcaatatcttcctcggaaggtgcggatggtatgcgggaaacggaaagcttctcccgtttcgccggagccgaatgatcaattcgctgttcggctgccggtaaaaacgccttctgcaactcatgctgatagtgttcaagaaaatactctgacagctcttcaacactgctgtattcaaagaaaagagtcttagacactcttccaaaatatttttccagacgagagttaagacctaaaatcgttagagaatcaattccgtaacggtcaaacgtatcctcgggtaaaatactgtccgccggtcttcccgtttccgctccgacgatctctgtcaaaagacggaccgtttgctttttcagatctttttcatgtaattgcggcaggttactgttgttttcaggcacagtctctatctttttatggtcagttgagagtaattcacttattctatctttgtctccgctgataacagccagctgagaagcagagcggctcatactgtcctgaaaagcggcaagccctgcttgggcggataaaagttccagccctgcatgtcttaaagcctgcagctctcccggcccgactgtcatattgcccgcatcccataacggccaattaatagaaagtgttttcccgggacgtcctttaatgcttcgatactgggtgaatccgtccatacatccgttagcgaaggcgtagtcgctttgacccgcattaggcagaacggccgaaagggatgaaaacataacgaagaaatctagaggctcttcttcagctgctttatccagccaaacggttccgaatactttaggcgctataacttcttctatgctttctttcgttttttttatgataaatgcatccttaacaagtccggcactgtgcaaaattccgtttaattctccgaatgtctgcttaatgtgcttaatcaaagcgtccgtctctttttcctttgaaatatctgccgggacatataaggcttcagcgccgagattttcaagagcgcttaatttttgcgccgtttcacgggaggccggggaacgcccggttaatatcagcttgacttctgcctgtttcgccagatattccgcaaacagatacccgagaccgccggctcctcccgtaattaaatacacaccgttcttttttacactgaaactatgtttctccccaacttctttttttactctttgaagctgccttttataataatgcctcggctcataacaggtaaagcggtccgtcttacattgattgttccattcaaaagagatgacatctgcaatatgctgctttgtaaacggctcgtcaaacattgatttcagctctgcagccttacatgtgaaattcggattttcggcctgtacggtcttaagaaaactttcaaccgcgttataaatcggctgaacctcgccctcggcattttcatacagatacaaaatttctgctttcggacaaagtttgttcgccatgaaggcctgaaacatttgaaacaaggaatacagacttttattgagctgctttctcattgcatcttccgtatttttgaagagcccggcagctaaaaaatgaataatatggcggggtcttatattttgagaacgcagaaccccgcataacgcatcataatcctcatcttttgcaaagttcattgtaaaacgaccgttccggcaatcttcgaaacgctcgccggaagtcacgtaaatgaaaggcgcctcataaccttcaagctgtctcttcattacggtatacatgctgtcgtcttcgcaaaaaaataaaattggctctttcgtatgcgggaattttttactgcctttaaattcatatctatcccataccatttcatatagatgggttttccccaagctcttaattaattccagcccttcttcaggcgtcaggttgcattctttcacctttttcacgatttgctcaatttgcatcgttttttcattcatggaaaagcaactcctctatcagctctgacgtctctttcgtattcatctcacctgtttgtgctttttcaagaagcgacatgatttctccatctgctgtatctttatttgagttgtgaagctcagtgttcgataaagcctcagccttctgcgcttcatctttatttaaatgaatccaatgtctgttcttgctgaaaggataaagaggaagagacagtttaaccggtttgagttcctcctcatacaagtcttcccagctgatttcacaaccgatcgtccacaactgagccagtttggccggcttgttttgctgaatcagtgattgaacatatgcatgaccttcggggccgccgaataaaggagcgtacagactatcaaaatccgttacatttccttcataaacaccttgcagcctgctcccctggatgtaaccgtttaatttttcaagaagatctccggtattcgagcaagtgatcgcaaggcggcattcaaatggttcccttccggtttgcagcgtatatgctatttcttcaagaccgattccggacttttctctaaaattgccgttatgcggtttatcagctgatcgattccggatgctgctgatatagcggcacagctcgctcagtgtctttaattcctgaaatatgtcaagtgatatttctgtgccgtacatttggtttataaaagagattaattcggaataagccaacggatcaaatccgaattccgaaagaggtgtctttgcatctatatctgcgatatctaaacgcaggatacccgctgccgcttcccgaaccgcctcttgcaaatcacgttcctgtacctcttgctgactgaattgaactgatagttcttcatgtaaaaacattgttaactctttggctttaaccatcagcctttcctttgttttggccgaaagaacaatgatttgttcccgctcggcagttactgctttatcttgtccgtattcaaattcttccacgatgacatgagcatttgccccgccgaatccaaaggaactgactccggcacggcgcggaatttcatttccttttcgatctattaatctggcccacttcatagttttattgacaatatgaaacggtgttccgcttaattgaatgtaagggttcagttcattgacatgtagtgtggcaggcaatgttttatacttcatggatagtaatactttaatcagccccggcattccagaggcgggctctaaatgaccgatattcgtttttactgaaccgatgccgcaatattgatcatgattctttcctgaatgcggctcaaaagatccaaacgcttttttcaagccttcaatctcaatcggatctcccagttctgtcccggttccgtgtgcttcaatgtaagatatcgtatcaacaggaatatcggcatttttgtaaacagacgttaacagttctgcctgagcttccgggttcggagcggtcaatgaagcagatcttcctccgtgatttgctccggttcctctcagaactccgtaaatattgtctctgtcattcattgccgcttgcaatggtttcaataacagaacagctgcaccttcaccgcggacataaccgtcggcaagtttatcaaacgtcttacaccggccgtccctagacaaaataccgagtttatcagtatacatatgcgtgactggatctaagagcagcgaaaccccgcctgctaccgccagctcactttcaccattttgaatcgagcgcacagctctgtggattgctacaagactgcttgagcaggctgtatcaatggactcactcggacctctgaaattaaaataatgggatacacgattgctgatgagcgcctggctgtttccggttcccgcaaacgcatgcgccccgtccgaatgcctcatcagcagctggcggtaatcattaaattgaatgcccgtaaacaccccgatatttttgccagacagctttgaagctttgtaacccgcatcttctatcgctttccaggtctcctgcaaataaattctgtgctgaggatccatgagttctgcttcccgcggattaatattgaaaaacgcctcatcgaatttatcggcatctgtgataaagccgccccatttcgaatgtacttcgctgcttcctttgccttcggcgtattttttccaatcccagcgatccgggggaatttcctgaatcaaatctttttcattgattaaattgatccaaaactcatctgcattttttgatcccggaaaaacacaactcatcccgataatggcaactggctgcttctctggatgatggtcagcctgtcttgttgtctttttttcaaacggaaaacttcgcggcggcttcacggttttcccggtggttttcccagcgtgcactactttccttttttcagaaatgtttttttctgcatctgtattcccttttgcaacagtacgcagttcactgtttagaaattctgaaagagacttaatatggctgtaagtaaagaaaacggcaggtgtcagcttaagcttgtattttttattcagtcggacagctaatgttttcaaactgatagaatcaaagccgagattgccgaaattctctgccgtatccagctgtccaatgttaattttcaataattccgataccatttgcttcagttcttccaggacattgtctgtataagccggtgctgtataagaaatttcctcttgacgaacctgaagcgtatttactttttgatgcggcagatcttttcttgctggtgtcgtttcggcatccccggtaacaaccgaaatttgcggacagtcacttgccaaaatcgtctcaaaagccgctatcccttcttccgtttccaaataatcaaacccggatgcggaaagatatgcttcttcagcttctttgtttaaatgcattccgcctttacgccacaacggccagttaatcgaaatgctcttgccttgtctctcttgccggcggctctgttcggatctccaatttatatattgatcttgaaaataattgcccaacgcatagttaacctgtccaaaatctccgaagaccgaagaaatagaagaaaatacgataaagaaatcaagcggctcatctttcgttaattcatctaaacataccgtgccttcaattttagcagtcatgccatctgaaaaatcagccagattcatctctgtaaataaccgatcatcggcatgaccagctgaatggataacgccttgaatagagccccaagtccgtttcgtttcttctatgacccgacccatcgtcttttgatctgcggcatcagcttgataatataccgcatctcctccaagcgcctgcagccggtcaatgttatggcgtttatcagctgttaacggtgaccttcccgtcaatactaattttgcttgatattgagaggctaaatattttgcgaaaatcaggcccagaccgcccaaaccgcccgttatgaggtaaatcccttcctgtttcagctgatgagagtgctctgtatgattgaatacatactcctttaatgtcttaacatacctcttgtcattaatatatttaacttcttcagcctgccgttccacgcctgaaaccatttcgttaagacaaaattcagccattttttcaattgatatacgttctgaaaaaccgattgacttcacattctctgcggatggcaccaacatatttgccgtttttaaacagcctgcaagagcgcccgtatacggatcattcacgccttctttaaaagagtgaacaagaagcagagaatgaagataaagagaggcgtcactgcgggcgctcagggcttttaataaataaaaaattgattccaggccgctgagaaggcggtcacccgcgtaaaatgtttctcccgtgtgcaagatgacatcaggagaaaacccctttttctctaattcttcgaataaacgaatgtaatctgacgtcacttccgggtttacatagaatgtcagcagattttgatcggtctgccgctgatccggcgtgacgagaatgacacggctgtctgattgatttttcagagctccagccagtgcttcatcttttgcaaagaccagaattgtttttggctccctatctttgatctcaatcagaggatttttttgatcccacttatgctcataaaaacgtacatttttattaggcttttcgccaaaaaccagcccgctcagttccatcaaaatcccgccggcattgtctaatacatacatatcataagccgaatcgctttctccagtttgttctgcatatacataaacgggttcagtctcatgatcaaaaatcgtacattctttaatgttttccgggagctctccggcattttcccccgcaaggtatatgacggcttgatatacgctctcaataacttccggtttgattatgcaccctttcggcccggcctttgcttttatttttaaaagtacctgtccgttcctgctgacgcagtgctctgccgctttcagactgtcactgcagctgtatccgaattcggcaagccgctgataaaacgcttcgtacggaatggggtctgcgcgctgagacagaaacggctcaagatgaatatttccgttctcgtacgccccgccttctaattcgagccgccctgaggaataaatggatgagtcgctctgtttttctatagaatacgatgcaccctgattatccggggttaatacaatccggatctgctcattgcttccgctttgtaacatcggttctctaaaggagagctctgttaatttaataatcggattccctgaagccatcgctccggcagctctcgccatttcaatctggctgagaaacggaaacatttccttgtcttgatactttgtttttatatacaaaccggtatcgcttacattgataagaaacttctgtgctttaaaatcagatatattgcatgaaatgtaaggatgcagatcgttattaacgttcatccggcggcttcccatattttgcgcatctattctgcacagctctttggcaaatggatatccgggtgctgatacccgtcttagagtggcatctttataaagtgacggccaatctaccccgttaccgccaacccagtattcagcaatcttcaaaagatctctgtttgcggctgcttcttcaatttcaactttattcatcctttgagcttctgttgtgtctttgccgcttgtaaaaatatgatccgtcgcgtttccgagagtatagtctgtcagtcctttaagcaattcatctcttgtggaggcgataacagccaatctgtgcggcatttcttctctgccggtttgtaaagtaaatgctgtatttctaagtgtttctaatggataatctctggctgctatatgttcttttgcgcgttttgcatattctgccagcctgtcggcattttttgcagaaaaaacaaataaaagctgttcaggttcttcagccgcgagaggagagatagcttcatccgcaaattcttctaaaataacatgggcattagctcctcctgccccgaaagaactgattccggcacgcctgggaacggatgactcccatttttcggcactgtccggtacataaaaaggtgttttttgaaacggtatattttcattcaattcagcagaatgagtcagtgacggaacaatcgttttatgtttcatttgaagaataactttcgtaatgcccgctatgcctgcagcagcctcaagatgtccgatatttgatttaatcgacccgatcgcgcatgttttcttatcgcgttcggcatctgaaaatgctctggtcagaccggtgatttcaatcggatctcctaaggcggtgcctgttccgtgagcttctatatagctgatgctttttggatcaataaatcctttttttaaggctctcgtaatgacctcactttgagctttgggattcggcacggtatatccattcgtcttagcaccgtggttgatggctgttgccttaataactgaataaatctgatcaccgtccgcaatagccttttttacaggtttcagcagcacggcacctgtcccttctcccggcacatagccgtctcctccggaaccgaagcttctgcaccggccatcactggataaaaatccgccttgagtcaggagttcatatttatgaggatgaatggataaattgacgcctcctgcaattgcaatttcacattcattcctgattaaactttcacaggcaaaatgaacagccgttaatgatgaggaacacatcgtgtccaaagcaatacttggtccgctgaaattaaagaagtacgatacccggttggcgattgatgcatatgaggaagaaacggccgcttcgtgaccaacgctgtacagctgatagtggccgtacataacccctgcaaaaacaccgacgttttttcgttcaagcgttttctttgcgtaccccgcatcttctatggtgtgccaaaccgtctctaaaaacagtctctcctgcggatcaattaattcagcttcggcaggagaaatattaaagaacaacggatcaaaatgatacacatcgtcaataaatcccccccatttgctttggttttttacttcatcgcccgctgcgggctgatagtgcagccccgaatcccaccgatcctcaggtatctcagttatacagtctttaccgttcaataagttttcccacagagtatcaagatcatttgccatcgggtaacgtccgctgataccgataatcgcgatatcattgtcatgatacttctcctgctgcacctgatttttcatctggattttctgtttcccgttaacttcggctgtctgttcatgatcttttttcttctgagatggggtgctgctcccgttttctcctaaccggagtttatgaagaagagtatccctgtgctcctcaacgaaatactgtgacaattcttctgcagtctgatattcgaataacagcgtttttgagagcgcgccgaaatgtttttcaagctcattcgtcatattgataatcataacggaatcaagtccgtatttttccaatgcctcttctgcatctattttgtccgcaggcatcctgaattctgcagcaatcactttgatgatgaaatcagatgtttcagctttcagtttctctgaatcaaatgattcgatatttctccctgttccttcatctgcctgaatattgtcttttcgttcatataattgctgaacatgattgtcaatttgctcatctccgtaaaatacagtaaattgcgaaaaaccggaggacaatgcgactgcaaacgcttctttaccttcctctttttctaaaggataaaaacccgcctttttcattgtctctaccgtgcgctcatccacttgcatgccgacttctttccacagcggccagttcagagagagagaaatcgtatcagaattccgggcagaacgcatattcatgaaatgatccatataactgtttccgaacgcgtaatcagattgcccgacatttcccaacactgcggaagtagaggagaagcaaatgaaaaagtcaggattttctttctcaacagcatcattcagccacatcgtacccaatactttcggtctgattacctgatcgaattcctctcgtgacttgttaagaaggaaagagtcacggatgattcccgcgccctgaatgaccccgtttacttttccataagaagttttggcttttttgactacatattcggcttcttccttattggtaatatcagcctgaacataaacagctgaagaaccggtatcctctaatcgtctcagctgttttcttatatgatctgaaagcggagatctccccgttaaaacaaggcagcattttgtttgaaaagccaaatattctgcaaaggtaaatcctaatccgcccgcgcctcctgcgataatatatactccattttctctcagcggcacatctccgcttccggaatttttttcgggttcatacattttgagctgtttaacataacgctgcatgtctttataacggatctctacatctgaaggctggaaatcactcagctcattgcgtatgatatcagctgcgtgaacagctgctattgactgctccatctcaatgctttttgctgagattaacggattttccagctgcaatgtccgcaaaaatccgcttgccgccgcgtaaagaggctgttctccagaaagatgtgaaaaatatccatataacagtttgatcggtttgcggcagttatttttgaagagcgcctgttgtaataaaaacaaagaatagactccgctgtcgcattgttcacgaatcgctctctctgtcttttcaaacggcatgtctgaccacaaatgcaccgcttcccgtatatctgacttctcttcttctataagccatcctaacaggtttatgtaatctctttcagagcgggggtcgatttcaaatacaccgtccccggtttttcgaaactctttccccggcttaaccaaaataacccttgtatcatgcaatgcagcaagttctttactcacatcttcatttttatcaaataataaaaggctgccctcacgccggccgccttttacatgaatgctgagatctgtccgctgccagaccgtctgataatatatcgcctgtccgttaccccctgcggaatgagaaccaagctgctgtatccgctttactccttcttccaaagaaatgatgccgctttctatgtcagaaagtactttttttctaatatgacgggcttctttcataaaaatcttcatcccctttacaaatggcactgccgcaaaatgataaactaatcctgcatacgctccagcgcataatctgcttcctccgcagtcagttcgcccgcttttaattgtctgaggagctcttttactctctcgttctttccattggaatccgctgttgcacgagtctgtgcctccgcggaaaacgtttcttttttacgaatggttacatccttcaaacctgcaagtctttctccttgttcattaagcagctgaatatcgtaaataagctcggattgacctttttggcctgttttacgcgcataaacccagcattctgctgaaacctttttccgaaccgtaacctctcctattgaaaaaggaacataaacagatgcctcttctcttccgtccgtaatgccgaacaaagattgcagagccccatcaattaaagacggatgcaatgtataatgttcaagagcatatgcggcttcttttggcagcaataagtgtgcaaccgcttccgtttttccgccccataaacgctgaatcggctgaaaagcgcgcccatacaggaacccgttttcccgaaaatactcgtaacattcatcttgttcacggacaaaagcacttctgtttatcatctcttgtctgtcgatgttctctatatcatcatcactgtaatgatgatcataatctaattcccccgtcacaaatccagtccttacagcagcatcctcgtcaggtgacatgttaaataatatactgccgtcttttacggaaatgtgagtgtaaatggtcaggctctctttcaaaagcatggccggtctggcaaatatcacgttttttaaacgagtgacctttttctttcgatatgaccgcgttcccgctgcgcatgccatttcaagaaaagcagctgccgggagaatgctcttgttttttacgatgtggtcttttaaccaaatctctttttctcttaatgtcgttttaaaaaactgctgttccagagtagattcattcgaatccagaagcgggtgcagtgaagactgccgcggcaatatttccggaaattctgcactttggtttcgaggcacccagtaagactcctcagcaaatggatataaaggaagcttgaccttttgcggggtatattcttcatataactctctccaatgaatatcagccccgaaagaccataattttgcaagaagattcaagtcctttgtctccatcatcacctcgaggaatttatctttcctcttttgatcatgaaagataaagactttatcaaaatctttcgtaacattccctttgtatacgccctctccaattgttccttcagtacagaaagttctcagcttctccttaagttccggcaaatcggaagctacaacagcaagtctgtcttccatcggttccctgcatgtctgcaatgtaaaagcgatatcagctgccgagacctttgtctcccgctctgtgaattgcagaaggcgccgggcgtattctttcagcctgtcttcatttttggcagagagaactgcggcaaacggaccgcttattgtttgtgtgtccgcatggttttgatattcttccacaatgacatgggcatttgctccgcccgctccgaacgaactgattgctgctctcctgcgggaggcgcctgattctttccgccactcttcttctttctgctgaacgtaaaaaggcgtcttttcaaatcggatattttggttcagctgttccgagtgaatggatggcgccaatttctgatgcttaaattgtaaaagaacttttgtaagggctgctatacctgcggcagactccagatgtccaatattagacttcactgaacctatggcacaaaattgtttatcgtccgtaaatttctcaaacgcttttgtcaatcctgcgatctcaatcggatctccgagcgaggtacccgttccgtgtgcttccaagtagctgacggaacgcggactgatgcccgatttcttgaaattttcagcaatcagctcagcttgtgcattcggattcggaaccgtaaatccattggtttttccgccatgatttacagatgttcctttaattactccgtatatatgatcctgatcagcaattgctttttccaaaggtttcaaaaggacggcgcccgaaccttctcccgggacatagccgtctccgccctctccgaaacttctgcacaatccttcggtggaaacaaaattaccttgactcagccaaaggtatttgctgggatgtatggacacattaacgccgcccgcaagcgcaatttcactttcccctcttttaatgctctcacatgccaagtgaatggccgtcagcgatgatgaacacatcgtatccagtgcaatgctcgggccggagagattaaaaaagtatgaaaccctgttcgcaatagatgaaaagaaggaactgagcgcaatcggattgccccgcgcagtttcttctgcgccgaataattgatattgtccgtacatggctccgacaaacacaccggctttcataccgttaagcttctcttttgtatatcctgaatcttcaaacgtatgccaggaggtttcgagaaaaattcgctcctgagggtccatcagctcagcttctttatgagaaatgtggaaaaacagcggatcgaattgatcaacaccgctgataaaaccgccccacttactgttgattttccccttctccattctgtcgggactgtaattcgctctgaaatcccaacgttcctcgggaatttcaataatacagtttttccctccggcaatgttttcccagaactcctcaagagtatcggaattcggatatcttccgctcacaccgataatggcaatatcctcacccggctgaaccatgctcggtgcagatgtatccttctgctgccggtgctgttttttactcagattttctcttttcttcggcactcttgttaccggagctgcccctgcggccttaagcactttttctttaaaagatgttaggaagaagtttgaaagctcttcaatgttctgatattcaaaaaagattgtttttggaagatccccgaaagtatcttcaagctttgaaataagtgacatgatcataagtgagttgattccgaatttctcaaaagagtccttcgcatttattttatgagcttggattttcaagacaccgctgatgatcttgattaaatagtcatttactttttctttcgcagcatgttcctcttcttcatcgtgttccgccgtgagtgtatcttgatctgctgcagctgtatttctttgaatcgaaagcgcttttatcattttatcccgctttccttctgcaggcattaagctggtaaatgaagaccgcagcattttcagaaacgcttccaaaacagaggaagttcgcatcggagtcattccgtatttttcttttatttggttgattccactgctgtcgagactcatcccgccatctttcaataacggccaattgattgatagggtttttccgtttcgggagagctgagatcgaagcactgcaaaactgtccataaaatgatttgcgtacgcatagtcactttggccggcatttccgtaagcggaaaaagaagaaaagagaacaaaaaaatcaagatcttcgtcttttgtcagctcatccagccagattgtcccgtaaactttcggtttcagtacgtccgtaaaatcactgagacttttatttacaagaaatgagtcacgaaggatgccggcagcatgaatgatcccgtttatgctgccgtaccgctgtttaacgccgaaaatgaatcgctctgcctctgttcgatctgtgatgtccgtccgctgatattcaacaatagagccgctctcattaagcttactgatccgttctttttgatcagctgttaaaaaagaacggcctgtaagtataatcacggcttggttttctttagcgatgtgttccgcaaacagcagcccgagttttcccgctcctccggtaatgatatatatgccgcctttttgatacgttacagatccgttggcgtgttccggaatatcaatatgctgcagccctttcacataacgggtatatgagtctattaaaatctcacattcatccgtttgaaagcgctgtatttcactgattgcagcatcccacatctcggaaaccggaggatttttgtcagaatcctcatggcgtatctgtatgcttttcgctttaagcttagagctttccatgtttaccgttttcatgaaccctccgacagcttcatgaaacggctgattcagaccgcttgtccaataaatatgcaataacgtaacaggttcgtttctccgcattaaagcttttgataataaaaagagcgagttgatccctctgcgaagagtttcattaacggatttttcagtgaattctctgatttctccgttccataaataaagcacgacatcaggtgtaaatccgttttcagccaaatcagacagcagcatttcgacatgattttcatcagaaggattgattgtgcatctattccgttcaattctataatcagaatcgggcgttacgagaatgacacggttatgatctccattcatcatctcggcatgctgaaaaagacggttatcctgatcaaaaatcagcatattccccggtgcctgctgattcggcatatcaatgttatttgttcttacccaatcgttcttaaaaaaaatggttggggacggagcttgtgattccggctccgcctttttttccatttgttcttttctgtaagtgcgaattagctccagtcctgcatcaggagacatttgctgttcttcaattaaggaaagtatttgtttgatctgcactattttccctccagcagctgataaacttgaccagcagaaagttcaccgtttttcaattgttctaataagaagagaatttcctgatcttcatttttacgtcctgcggttaattctcccccggtcacttttctgacagaaaagtctttcatgctcacggctatttcgccgctctcgttaataaaatcaatgttatacgtataaaaaccggtttctctcaccgagacatggcatcgggcagtaagcgtcctcttaatgtgaagctctctaagtgaatatggaacaaataagccgtctttctcattatctcttaacaaaaatgccgccgcttgaaaaccgccgtcaattaatgaaggatgaagtgtaaaatgtgaaaacccgttcgctaaatgagccggaagctccaattctgccattaactccatatcaccgcgatatacggctttcaacgtttgaaaaccgctatgatatgtcaggcccatacgactgaagcggtgataacactcttcccggtttatgaccgccttactgctgcgtttgaacttatcaatatcgacatactcagcattgctgtttatgtctccgaatactgtttcactttgtgtgcagatttgctgcacgccatccggcccctctttacatatcgttacgttcaacttatcttgtttcatttccaagtcggtataaatgtgcagcgtttttcctttatataatataggtctgttccacatcacgtcttttattttagatactttactttctccgcttatttccgcacaaacaagagccatttcaagcgaagcggctcctggcagcacatagtctcctgaaacaagatgatcagtgacgaaaaattcagttccggaaataacagttttaaatgcttgtttctttaatgttgagacattctcgctgattaatgggtgaagacttttgctattaacctcgcttttgttctttttcggggtgaaccaataactctcttttgcaaacggataagttggcagcggcactctattcaatttcttattgccgattgtcttccattcaaactcggctccattggcccaccattgtgcgagcagctcctcttttccgctttgaagagcctcctcaatcatatattcagaaacagctgtgggctcttcagtgttttcgcttataaatacgcctttttgcaccttgctgtcatcaagaaagctgacgtatttatctctcagctcagtcagactcgctgcacatacggcaattctttcgttcattgcttcccggccgttttgcaatgtaaattccatgtcactggcattaacggtcatgtcaccggcaatcacgcgatccaagtactgaagcataagccggatatactcaagtaattgatctttggttttcgcagataaaacaaaaatatgtgtgttaccgttgttttccggcatttctttttgaggttccctatattcctctaaaacaatatgcgcgttcacaccgccgaatccgaatgagctgacacccgctctcctcggcagatcgttgttctctttatcttttatcggattccacttttgagcggtttctgtgatataaaatggcgtattttccagtttgatgtatggattgagttctgaaaaatgggcgagtcccggaagtttgcgatatttaaaagccagtaacactttcatcactccggctattccggcagcggtttcgagatggccgatgtttgttttcacagacccgattccgcagcatttctgtttcgcaaaaggaatgtcccattcttgatataacgttttaaatgcctttatgatgctgtttacttcaatcggatcgccaagacttgtccctgtgccatgcgcttctatatatcccgcagtggcagggctgactcccgccttccgccaagcttcggttaataagtccgcctgtgcgttcggattcggagctgtcaaagaattggcgcggccgccgtgatttacagctgaccctttaatcaaaccatatatatgatcaccgtctgcctgtgctttgctgagcggcttaagcaatactgcagccgccccttcactccttacatagccgtcagcgcttttatcgaacgttttgcactttccgtctttggaaagcatacctgctttatcaaaagctataaacagagtagggcttgtcataatatgcactccgcctgcaatcgccatttcaaaatcgcctctttgaatcccctcagccgcacgatggagtgcaactaacgaacttgaacaggcagtgtcaatcggttcgctcggacccgtcaggttcagctggtaagaaatacgatttgccaatatacaatgatttaaaccggttgcggtctgcgcctgaacagagacaccattttcattcagacgttcagcataatccgttgtggcgacccctgcaaacaccgcggttttcgtccctgccaaatcagacggcttatagcccgcatcttctattgttttccatacagtctccataaaaattctttgctggggatccattaattctgcttcggcgggagaaatcccgaaaaacaacggatcaaaactgtccgcgcctttgataaatccgcctttttttatttttgttctattgacgtccctgatcggatcgccgtcaaactctttccagttccaacggtcttcaggaatgtctgtaatcatatcccgccctttttcaattccttcccaaaagtcttccagcgtatctgtttgggggaaacggccgcttattcccactattgcaaccggctcattcatatgtctttcctcttgcctggttttgttttcaggctcaggggaatgttcataagattccggcggaggcgtgctgtacaatgttttttcgtcagctgcagaaaaagattctgtctcagcaaaaaggatttctccgtattgctcgattacataatcagtcatttcagccagtgaattgcattcaaagaaaatggacggcaataattccgtaccatattgttgattgatttcatttccgagtctggtaaacgtaatagaatcaaatccgtactcgccgaatgaagtctcttcttctatttcctttctgtcaatcttcaaaatacttgacatcatctttgcgatgccctcaatcagattttctctccggtctttcgccgcagattcatctgaagaaaaagaaccgcagagatgaagctcctcggaatactcactctttaaaaactcaagaagttcattaaaatcagtaagaccgaaaaaatctgacggcatcattgatattcctaaagtttcgtttaattcgttgcccagcattgtaaacataattgaatcaaatccgtattcacttatcggcagttcaaaatcaaattcccgttcttcaatttttaatacgccggtgatgatgcgtgtcaaagtgctttttaaagattcagttattgacagctctttcggttcgtgattttcgtcggcgattgccggatcactttttccgctgtcaatcgttatcattcgttccagctttaattcattaccgctaaataccattatttgatgttcacaccctgtcattgcttgatcaaatgctgcaaggccttcccgttttaccagaggcagcattccgaaacggtcataaaggaacttctctgaatgaatatcaatttgcataccgccttctttccataaaggccaattaatcgagactgtttttccaggtttattttccgccgctctcatttccgcaaaataatccataaaccggtttgcataagcataatcagtttgtccggcattcccgattattgcgctgatagatgaaaacataacaaaaaagtccagaggttctctgtctgtataccggtcaagccatattgttccgtaaaccttgctggccaaaactgaatcgagatcctcttcacgcttattgatgagtaatgaatcttttatcacaccggcgctgtgaataattcctttaacaggacctaatttgtttttgacgagttttatcaggttattgacattttccttatcagaaatatcggttcttacataaaaaacctctgatccgtttttttcgagctcttttacattgcttacggcttcctcagaaagctctgacctgccgataaggacaagttttattctcccttttcgcacaagatgtctggcgaaaatcagtcccagaccgcctgttcctcctgtaatgaggtaaactcccccttcttttacttccatcttttcggggggctcggcactttcaatttctgcagagtgctttacctgcctgattccatctctgtatctgatttctgaagtatcatcgctgatgattgtttctttcacaaggttttttaattcaggcagaccggtgttcagctgtaactgaatttcgtcgctgtgtatttcaatatttttaccggacaacataggatgttctaaatgaagcgacctaaaaaagccgctgattgccatttgataaggtaagatttgattttcccttgtgaaaaatacatgtgatatcaggattttatgtcttgggattgttgctaacagagctttcgttacattgaaaaccggcaaaacagcctcttccagcttttcacgaatgttctgctcaattcccgtttcagggctcatcccgattaaaatgacgcggtcaattgtcacttgtctttctttaagaatcgccagcaatttcttatagccgtcaagtttgacgctgttcaattcaaaggaatcagcttctttttcttgaaaactgccgccatggcggacaaagatcatgttcaggccgatatctttatatgcctggcggatcagcggttctgatatatcccgacggagtgaaatcacaaggcagctgtttaaaccgctggcttcaggctgatgaagcataggggcccgcttccacatatctgtgtaatacttaactgaatgccgcttatcctgagtctgcggtgcagcccttaatgccttcaacgctaagttttttattttaagacttacagatccgttttcatccataaatagtatatgaaaccttttgacatcatcatgttgtctttcatcggcagctgtaatataagcaaagccgtttgccgaaggtgcgtgaagaatctccagctcacctaattcaaaaggcaaatatgcggtgtgatcgtcttgctgactggacgtaaaccctgttgtggattgaaaaatgccatccaataaacacggttccagcagcgtgccggattttttatgaatgctctcaggaagtgatattcgtgcaagaacagcattttcatggataaacagctgttttattacctgaaaactggttccatagtccaaaccgctctgccggaaatccctgtaacattcagcgccgctgattaatcttttctgtccggttaaccagctgtccaattgaaaacgctctgtatgagaggcatcttgatctccgcatgtggtaatgtttccttggcagtgaactgccgcttcaggttgcatatcggttttcaccacaaatctgccgtctttttgattcggcagcagatctatcattatcgtcttttctttttcaacggttatcggaaccgcccatacaacctgactcagttttatgactgattttccgtacagcctctctcccgcttctctggccgcttcgatgattgccgctccgggcagaaccgttttcccatgcacaacatggtcttttacataatattcagaatcagaaagcgttttataaaatcggcactcacctgctgaaaaatcaaataaaggagctgtaccggctgctgatgttgtttgcgccttatttgacacccacagtctgttttttaagaaagggtaagtcggcagggcaatttttctcggttttctgccggtgcggaaatcttcccagcttaaattgcctcctgatacccaaaattcagccatttcggttaatctggtgccgccggatttgagcggaagatccgattgctgctgtctgcgtttatgattcggttttttccctctaaatatttcgtgatcgtcaattccattataaaagtgatttaatttcaacatcagatcatcgatattatttgaaatgacagcaagcctttccggcatggcttcacgcccttcaagaagggtatacgcaatatcagaaaggtgaagcggcttgtttgttcccgcttgctgtaaaaactcgccctgcttatgacgggccttttgaagatattcctccagctgttttgctgattcccgtaaactcagtgaatgcttggctgagagtacgataagttcctcactttcctcacgcctcgtatgacagtcagcagcagactcatactcttccacaaggatatgagcatttgccccgcccgctccgaaagaacttaatcccgcacgccgcggatatttgctgtcagaatgtttttcattcgcgggttttatccagtcggcggtttcctgctggaggcaaaaaggtgtctcttccagataaagatccggatgcacccgttcagcatgcagtgttgcggctatttttttatacttcatttgtaagataatctttgtcaggccggcaatacccgcggccgcttccaggtggccgatgttagatttaatcgatccgagagagcaatatgaaacatcttcggtataagctctaaacgccttggtcaggcctcggacttcaatcgggtcacccagcggcgttcccgtgccgtgggcttcaataaagctgacacttctggcgctccaaccggccgctttaagagctccttgaattaaatccgcctgtgcggcaggattaggcaccgtatagccatttgtctttccgccatgattaattgccgttcctttaatgacggcgtacacagtatcattatcacgtatggcatctttaagcggtttaagaataacggcccctacaccttccccgggcacgaaaccgtcgccgccttctccaaaacttctgcattttcccgattttgaaagcatccccatctgacacctgtataaatagtcagaaggatgaagatataaatttactcctcccgcaaccgcaaccgagcactcaccctttgttaaactttggcaagccatgtgaattgccgttaaggatgaagaacaagctgtatctacagggacactgggacctgtaaagtcaaatgtgtaagacactctgttcgcgagagaccatgggaacgaatttggaagtacatcgtttttgtccgtcggtattctttcgccgagcagcttgtaagaattggtcgtcactcccgcaaatacaccgacatgtttttcggtctgctttctcaacccttcaatggtatatcccgaatcttcaaatgctttccacacggtttcgagaaatattcgttcctgaggatccatcgcttctgcttctctcggcgatatttggaaaaacaaagaatcaaatgattcagcattctttaaaaatccgccccatttgcaataaattttcccctcatgcgctttagcggggtctggatcatagtaggtctcataattccatcgttctttcggaatttctgtgattgcggttctctcttttgatagaagctcccacaattcttcgatattttcagccccgggataacggccgctgataccgattaccgctatcccgtcaagatgttctttttcctccgccgcaggtgcagtgatgttttgttccggcctggcgggggtaatactctgaatctgttttcctttttcctcccgtgaaaataaacgccccagccgatccggatattcctttacaagatgatctgctaaatctctgattgtatgaaattcaaataaaagcgttttcgaaattgctcccagtgactgctccagctttgtgttgcattgatgaatcataaccgaatccattccatattcagccagatgcacatcttgatcgatctcttcccgttctgcaccgatctcagaggagatgatattggttaaaaacaaaactgtctgatccaaaatatcgccttgagccaaaggaatggcactgactgtctctgtttcgtccgtcaaaaatctctgccgcataaattgttcaaagcgctcatgatcaccgcagactgcaatattatgcagctgacacgaagttacaatccgcgaaaaccattgcgttccgtcttcagcaggaagttcttcgagcccggaaccatgaaaaagagacgtccgcccttgacctgacaggttcgcccccattccgatgtcttgccataaaggccaattgattgtcagcgtgcggccgctgcgcagagaattttgccgtttctgttcccgatattcggcaaaatgatctaaaaagccgtttgcatatgcataatcacattggccttcgttccctgcaatagagacgactgaagaaaaaacggcgaaaaaatccaattcgagcgacttcgttgcatgatcaagattcaatgcaccatgaactttcggagcaatcacctctgaaagttcatgctttgtttttcgaaaaagcagcgagtctctgataactcctgcacaatgaatgacgccatgaagacctgcatgctgatcggtaataccgtcaatcattttttttaccgcttctttatcggatatattcgcctgtatataataaaccttggctttaaagctgttcaggtattctaaatgtttctgcttatctccgtttaaaacagatcgccccgataggataatggtggatctttcagttttcgcgcaatattcagcgactttactgccaatccccccaaatccccctgtaattaaatacactttatctttttcagggtattgaacggtctttctgtttgtttctctctgcttctctaacatccgtgcatatcttacgcagcccctgtaagtgatatgaatatgccgatcaggcgctgtgtttatttctttataaagaatgtcagccttctctgaaaatgaaacggatgcagaatcatgttcaaagcaaaccgtcttacaatgaagctgcgggtattcttgttttaccgattttaaaaaaccgttcacaccttcaaaatacggcaatttttctttttgattcgcgctgaatgtataaatgaacgttactttatttataaggttctcgctgattaaagccttagtcagataaaacacggaataaattcctgattcgagtgtttcttccagttcaggctgtttttcagaccacgtatgcaaaattgcatcgggcgctgcgcctttttcctttaacagacgaatgacaccttgataatcttcgggacgctgcctgttgatcgtgaaaacactgtcgcttatctgctctaaacgctcaccgggcataataagatatgcggacgtattctctctttttttcagctcttcaaaatagtctttattcccggagaacaacaaaatagtacaagcttgtcggctgcccgcttcattctcaattgcggtttctttccataccggcgtataaagtgcctgattcttcttttctgaaaaagccgcgtctgattttaccggctgagggtttaaagaaaattgagagcgctcaaacggataaggcggaagcggggcttttcttttatgataatcacctagtttcgcccattcaatctcttctcctgaaagccacatttgcataaatgaatgatatagagcctcatcggctggtttgtccgcttcaaaagcagccgctttgtttagttttgctgatggagggagcgatccgaattgaaaaactgaaaaatcagaaatattcacatccggctccgttcccttttcttccgtgtgaagcggcatatggtcagctatctcctgagacacggcatccatttgattgtattctgtcatcaacggaaaacgagttttatcataaaaacctgccggctgctcattaatacaagcaacagcctgtttaattccgtcttgctttttcaataacatgctcagaaaaagttctttagacaagattccttcatccagtaaatttaatatttccagaacataatcattattaaagaatccatcataatctgttaaatcccatctcttatacagtcttctcatagaggcaaggatagccatgatcgccgcttcctcatcagccggcaatgcgtttcttttatccgccgtgcgattcacaatataagataaaatctcgatttcctgagtctttcccgctttatcccactcttctaaaaaccctttaaacgtatattggtgctcaagaagcagccgtgttttcccgtacaggcggtctgcaaaatcagcctggaagctcagaccgttcagcagcatccttacatattcttcatttaatcgaaccggcgggtacgtttttgaagtgtacggattgacaaatggaatggacggcggctcacaggatatgtgcgaaagtttttcagcgcctgtgatgacagaaatggccttttcaattttgatgatatccgctgctgcaagagcgacgtaatatccgtctccggcgcctgtaatgaggcttggcttaaaaccggatgccaggatactttttatgatttccgtattgataactaaagaatacaagcggattttctcaggcgtccattttcttttaaatgaactgtgcaatgttggtatacccttcagcaccggccttactttcttttctaaatcagggaacacccgtttcaaaacggcaaattgtttataactttcccatttgaagtcaccgatggcaagcgcccattcagaaccttgtttcctccgaaaacttaatccctctttaagctgatttttaaattcctccttgctgcctgccaataaaccagccctgtaatcaaacgatgtccttgttaaaagggtgctgctgatcacttcatttgatattttgcaaaattcctctgaatcgtcagcaaaggttctccaatgatgtatcatttgtttcatgctttcttcacttttagcggaaaaaaggaagggtatccttccttttctatcagattcgtcttttgtatgtataaattcttcgatgatgacgtgagagttgacacccccaaaaccgaaggagctgattcccgccctgagcggagccccgtctgccgccttccaatcacttgaatcaagcgccggcctaaacggtgttttttcaaactgtataattggatttaccgtatgtacattcaggcttttcggcaccctccggtgtttcatcatcattagaacttttatcaatccggccattcccgccgctgcttctgtatgaccgatatttgttttcacacttccgatcctgcaatattgagtatcctcagtatattgccgatacgcttttgtcaatgcttctatttctatcggatcgcccagagatgtacctgtgccatgtgcttctacataagaaaccgtcgcagcatcgacagcagcgttgtgtaaagcttctgagatgacccggcactgcgcttctgctctgggagcggttatggaacgggatttaccgccatgattaacagctgtcccttttatgatcccgtatatatggtgaccggcttttactgcatcaccaaggcgctgcagcaatacaacgcctgccccttctccgggaacgtacccgttcgctgctgcgtcaaaggttttacatttgccgtcaggactcagcattctggctttggaaaaagaaatatattttccgggttggaaattcaagtttactcccgatgcgattgcataatcgctttcttttgtccgcaatgacttaaccgcttcatgtaaagcaacaagcgatgatgcacaagcggcatttacagacatgctttttccggtcaaaccgaatgtgtatgaaagccggttggaaagcatagcttcgaaacttcctaaacaggcataactgtcgatttccgattcagcatgacctgtctgccggtagtcagaattcataatacccgcaaaaacagaagtggttttacgctggagatcctgcaaagaaaccccggaatcttcgatgcaccgccaagtttcttctaaaaggattctttgctcaggatccatgtttttcgcttcccggggagagatattaaaaaacttatgatcgaaatggtcagctttatgaataaaacctccccacttgctgattgttttgttcggtatactgatatcagctgaataataaagatcgggatcccaccgttcaatcggcacttcccggatggaatctttgccgctatttatgttttcccagaattcatgataatgatctgcatcggggaatctgcaagcaaccccgattatcgcgatatccgcactctgtttattcaaatgaaccattggcctccacccgccccttctttagtgtagaaataacgtatccaatctgcgccttagcagactttcggtctcattcatcaatttttcaccaatgtcatcgacatgtctgtttctccatgattccaaatccgtgccctttacccaatgattaaaagcgcctaaagacgggccgcaatgaacttggaaattcaccttttgttcttcctgcccttccaaagcaagcagacatcctctctgcaaataccacttaaatagtaacagcatcttatatttttgattgcgctcagctttttgggcgaggttcggctgtttttctattaagctttcgtagatttcatcaaaagttttgttaaaataatcattttcgagctgaatctttgtcttttcatctatctcactcaaagactcatattgttggtagatttgaaataatttatttgccctgaccggaaacagcgtgccctttttcagcacctgaacttttgttccgaactcaaacagagtctccgaaggcgcataagcagtatcgcatattcctgtctcactcagcatttctttaacaaaaccgcttgtttcggcttcaactgtacattgattaatggatcccgtcataataaaatcagcgcccattaaaaaagcagacgcggcagactcgggagtcccgattcctcccgcagccccgatccttatcttccttgcgtatttgtgtgtttccatcatttcatcccgcaggttaacaaaaaacggcagcatcgctggcaatgagccctgttcagtattacttccgcaatctgcttcaataatgatatcgtctgctgccggaatacggctgagccactccgcctgctcttccgtcagcataccgtgctgacacattctctttacgatactttgaggaggcggactcagaaatgcggccgcaacttccggccgtgaaactttggcaatgatccgattatgaggtatgaccctgccgcttttgtctatcttcaactgatgcgctttgtaataaattaatggtgcgctgacagaaagatacgaagacgcttctattactcgtacgtcatgcttgatatataaatctatcaattccttttctctatcttgatgatccggctcaaatcgcagattcattccgtagggctggccatttttgagtgtcttcttaatagaaataagggcctgttcaatttcccttataggtaaacccgctgtgccaaagaaccccagcattcctttcttcccgaggcggatcagcatttcagcggaagagatccctctatgcatcccacctgccaaatacgcgtatgtcaaaccgtaatcttctttgaaagattgatcacccaatcgggacaccggtgaagctgcaccgctctctatattttcagccaagaggctatgctctttcccgctttccgaattgtccttgttcccttcagaaaaaaagagactgtcttccggcgcactgatagtaagcggttcctcatctctttgtatggtttgaattaatttagtcagaatgttgccaggaccgatctcttcaaacagagtgacgccttgtcccattagatacctgatgctttcagtccattttaccgagtttgttatttgttcaattaaattccgtttgatatcttcttgtttataaggtcttgccgtatagttggaaatgaccgggaaattcaattcagaaaaatgaaactcctcgataaattccgcaaattcacgctgtgcactttccatgaaacgagaatgaaaagctccgccgacttgcaatacgatataagctttcgccccttctttttcaaaaaaagaggctgcccgctttatctcttctgcagcccctgctatcacaatttgtgaagatgtattgtaattggcgatatctatttggccgagttcatacttttgaagtattttttttatgtgatgctcatccagtccgatcacggcagccattccgccctcggaagcctcactcattaactcgcctcttttagcaaccagccggagacctgtttcaaaattaaaaacgccggccgcaaaaagcgcagtatattcaccaagactatgtcctgcaacagcatcagggcgggtatgaccttcttttaaaccctttaaatattgcagtgcgctcactgtataaattgcaggctgtgtatacttcgtatcagtcagcctctctttttcatctgaaaggcataaatcctttatggagtatcctaaaatatgatctgcctttttaatgagctcactgaattcatcgaataagtctctgcccattcctttaaactgcgctccctgtccgggaaagacgtaagcaagcatttgttttcctcctgttccgtatttctgccgtttcttttcgttccgattttgattaacgtttttcacttcaattttaaaattgccgtttactctcagcacccttacttaataagcattactaagcaaaataaaaaaacctttatgccggataaaggtttaaaagcaaaaagcatgtacaaatatcatatcgccgtaaatataaatagatagaattttctgataattaaaatcacattttcattctgttttatatatatcaatataataaaaacattccaacgtgccgaaacaacgattggttttatgtgaatatttccctaaataaatattataccatgatttacttgttgtcaatgggaaacacacgtatataccaattcttcagccgcctttttacaggcggctgaactcggttgttatcagttcatcagcccatgccgatatgccttcactatactatttgcggaataatagttctttctctttgttgtagtctttagtaaattgattgaactcatctgcttgtttatgcaccttttcgtaaactgagtttactttgctgatttgctcttccagctgcgctaatgtgagctttttatctttaatcagcttataaaggtccttatcaagtgatatggctttttcgtactttttgtacaaaagatcataagatgcataccttttccccattaaagcgacagcatgcccggctttttcttttactttcttatcctttatttcttgagaagttttttttgcggattcaaacgctttttttgaatcatcaatactgtctttttctgctttcagatgtttttttcgctgatttgcattgctcagagcctgatcagacagtgtgacaattttctggtaatcatccatattcagtttaaccgcgctgtcgtatagctgatgctcttttttctccaatttttctaatgttttctgctctttttgaaacggtttttccgcttgaacggctttttccatcgagtcatgaagcgattcaaccggatcttttcccccgcagccggcaagcagcatacttgcggcgccgagcgctccgattcctgctaatacctttttctgaatcatattcacttagaatcccccaatcttgacaatttccactatagaagcccagacgctttttgacaatagctgagctgtaattggcatgaccgtgtaaagacgcttacggtgctttcaaagaatacttgcgtaaaaaattgagaaaacagggcggatgaccatacatctttttggcttttacatagtttatagtagacgccggccctgctgacagagggtcagcgtaattaaaagaggaggtttttttatgtacggatatggatttggcggcggatttggcggcggttgttgcggcggcggatatggttatggcggcggttacggttacggctgcggcggcggatacggccgcacattcgcattaatcgtcgtattgtttatcttattaatcatcgtcggtgccgcttatttaggctgcggctgctgacattatacaccatgacatcggccggcctgctatggccggccaattgtttcattgcgccgcgataaagaaattcgctataatttacatattaagctttaggagtgaagtttcttgattactatggaaaatattgtacgagacggacatcccgcgctcagagagatcgctgaagaggttcagcttcccgcttctgacgaagaaaaacagcatcttgctgatatgattgagtttgtgaaaaacagccaagatcctgaattagccgagaaatacaagcttcgtccgggcgtcggtcttgccgctccccaaacagacgtaaaaaaacggatgatcgccgtccatgcagaagatgcgaaaggcactttatacagctatgctctttttaaccctaagatcgtcagccactcagtggaaaaaagctacttgacgagcggagaaggctgcctgtcggtagacgaacccattcccggctatgtgccgcgctacgcccgcatccgcgtaaaggcggtgacgcttgaaggagaacagattgacatccgcctcaaaggttttccggccatcgtgtttcagcacgaaatcgatcatctgaacggcgtgatgttttacgaccatatcgataaagaaaatccgttcaaagaacctgaaaacgccattgccattgaccgttaaaaataaccggcacttcccaaagtgccggttttctttatttcaaaaggcccagttctttgacggcccagctgattccttcctcatccaccggctttgtgacgaaatcagcggcagcttttaattccggaaccgcatttcccatcgccaccccggtgccgacaaaacggatcatctcaagatcatttagtccgtcgccgaatgcataagtgtcacttacgccgtacggaagccgctcaagcactcttttaatgccttccgcttttgaaccgcctttcggaagcacatccgttgacaattcatgccagcggacgtaatcaaactccggaaaagcgacatatgctttttcttcatgtccgcggcagaataaaagcagctgataaatttcttttcctttataaaatgtttcatcaacttcgggataaggcgctttcagactgccgattccttccgagacgtgcggatgtccggggacggtcgttttcatcgtgtcttccgccataaatacgacggggtgctccccttctgccgcctgctttaataaacgcgcaaccgcatcttcaggaagcggatttttataaatgacctcaccttcaaatacgacatactggccgttgtatgaaataaatgattcaatctcaagctcttccagaatcggttttaccataaacggggaccttccgctggcgataaaaacgtgatggccagcctctttaagcgccgtcacggcgtttcttgcgctatcgggaatatgtttatcatggtcatagatcgtgccgtcaatatcaaaaaagatcagttttggattcatgtcaatttctcctttttcccgtttatcagtcgtgtctttttcaatatcatcatacagaaagtttttcttccggaaaaccgccttgatgaaattccagttttacccacgaaaacaaattcattttttccgcatactactgctataaaaggctttaaaggaggtatacgatgctgcgccgattacggaagaaactcagaagacagtggggcggaatgctccggaaaaaagtcatcgcgtagaagggatctttcggtttttgaaagtcccttttttgctcgagactttccttataatccgttttcgaatataatagaataagcgagtctaacatacggcatttaaggagagatttggatgatttataaggtattttatcaagagaaggctgacgaagtacctgttcgggaaaaaacagattcactttacattgagggcgtttcagaacgggacgtcagaacgaaactgaaagatcagaaatacaacattgaatttgttcagcctgtggacggtgcttttttagaatatgagaagcagagcgaaaattttaaagtattggagttatgagcggaatgaaatttgtaaaaaatgaccagactgccgttttcgccctcggcggattgggcgagatcgggaaaaatacgtacggggtgcagtttcaggatgaaattgtactgattgatgcgggaatcaagttcccggaagatgaacttctcggcattgattacgtaatccccgattacacgtatttagtaaaaaatgaagataaaattaaaggtctgtttatcacccacggtcacgaagaccatatcggcggtattccgtacctgctcagacaagtaaatattcccgtttacggcggtaaactcgcgatcggcttacttcggaataaacttgaagagcacgggctgttaagacagactaaattaaacatcatcggtgaagacgacatcgtgaagttccgcaagacgtcagtatccttcttcagaacgacacacagcattccggattcatacggaatcgtcgtcaaaacaccgccgggcaatatcgtacataccggggactttaagttcgatttcacaccggtaggcgaaccggcaaacttgacaaagatggctgaaatcgggaaagaaggcgttttgtgcctgctttctgacagtacaaacagtgaggttcctgatttcaccatgtcagaacgccgcgtaggcgaaagcattcacgatattttccgaaaagtggacggcagaattatatttgcgacattcgcttcgaatatacaccgtcttcagcaggtgattgaagcagccgttttaaacggcagaaaagttgccgtattcggacgcagtatggaatcggctattgaaatcggacaaaatctcggttacattacctgtcctaaaaatacgtttattgagcataacgaaatcaatcgtatgcctgccaataaggtaacgattttatgtacgggaagccaaggtgaaccgatggcggcgttatcacgtatcgctaacgggacgcaccggcagatttccattaatcccggagatacggtcgtcttttcttcctctccgattcccggaaacacaatcagcgtaagccgcaccatcaaccagctgtaccgtgcgggcgcagaagtcattcacggttcattgaatgacattcatacatccggacacggcggacaggaagagcagaaattaatgctccgcctgatcaaaccgaagttctttatgccgattcacggtgagtacagaatgcagaaaatgcacgtcaaactcgcgactgattgcggcatacctgaagaaaactgctttatcatggataatggcgaagtgctggccctcaaaggcgaagaagccgctgtggcaggcaaaattccgtccggctccgtttacattgacggaagcggaatcggtgatatcggcaatatcgtgctccgcgaccgccgcattctttcagaagaaggccttgttatcgttgttgtcagcatcaatatggacgactttaaggtttcggcggggcctgatttaatctcaagaggttttgtatacatgagagaatccggtgatttgatcaatgacgcgcagcagctgatttcgaaccatctggagaaagtaatggatcggaaaacaacgcagtggtccgaaattaaaaacgaaattaccgatacacttgctccgttcctatacgaaaaaacaaaacgccgcccgatgatccttccgatcattatggaggtctaaaaaaactgcactcgtaatgagtgcagtttttttattgcagcggaatatgctgaaaggctttgacatcaaacagaccggctgctgtcattttaatatccggaatcaccggaagcgctaaaaacgataatgtgagaaacggattgaaatcaccggtgaatccgagcagaggaagcttttcatgaagtacgcccaagctgtcattgacccattccgccgacttatcagacaaaagcccggcgatcggaagcggaacggagtgaagcaattctccgtttttcacggctgttaatcctcctccggtgtcacggagcctgttgattgcttttgccaaatcggcatcgtttgtaccgacggcgatgatattatgggaatcgtgagaaatggttgtggcgatggcgccttcttttaacccgaacccttgtacaatcccgagtcctatcattttttcgccgctgtgccgctctgtgacggcgatttttaataaatcattttctgtatcaggacaaaacgcgtcagcagacggtgcaggcacttctttttttctcgtctccaaatgattcggtatcatttcgattactttcattttcctgccctcatgaatcggcatataaaaatcagattcagtcagcggcgatctcagccgcactgtatccaacagcgcctggtccggcgaataggaaccggcagactgttcataaaccgttcgtccgttctcggcaacggtccggccggcgaccatggtcttcgtgacggcagcctcccgtacatctgaaatgaacagcagatctgcgtcaaaacccggcgctaccgccccttttgtttcaaggccgtagcactcagccgcatttaagctggcgagctgatacgcaaggaatggatcaagtcccgcctttatcgccattttgacttggtggttcacacttccttctgaaagcagatcatctacatgcttatcatccgtacaaaagaaaaagcggcgcgcgtttttttcattcactgccggcagcacattgagcgtattttttgccaccgatccttcgcgcagcatgacatacattccccgtctgattctgtccagcgcttcttcttttgtcgtcacttcatgatcatttgacaccattgcggttctgtatatattgatgatatctgaagacagtccggctaaatgcccgtcgatccgttttccgtgacgcttggcatcaagcagtttctgaagcatatcctcttcaccttccgcaacagacacataatccattacttccgcaagtccgagcacctctttctcctgataaaaaggctttaaatcctcggcttttaatacggctcctgagcgttcaaagctagcggcgggaacacaggaaggaagcatgaaacggatgttcagcggcgcctttttcgcctgctctatcataaaagaaatgccttttgctccggaaacgttcgcaatttcgtgaggatcagtaatgacagtagtcactccgtgtgggaggacggctttagcaaattcaatcggagtaaccatagaggactcgatatgaacatgtccgtcaataaagcccggaacgatcatttgaccttctgcatcaatgacttcttccccttcatattcgcccagcccgacgatcactccgcccgtaatggcgatatctgcagaaatccattcctggttaaatacatccatgatttttccgtttttaatgacggtatcggctttttgtctgccggctgatgcattcagccgttcagccagtgtttctttgttcaaaatgaggcctcctctttttctgtatatggtacaatatgctatcggatcgcctgatcatagtcaataaaaattgcagaaaataccgcttacacgataatgtctttctattctgacataataaaagaccgtccttttacggacggcttttcactttgtgtgaagcactcttttttcaaatcgggaaatgtccgtaagagagccgataacgatgagaatatcttctttttggatcatttcagtcgccaggggagatacgatcacttctttttctctcttgatggccacgatattaatgccgtacttcgcccggatgtccagatcaagcagtgtgttgcccgcaagcctgctgttggccacgatctccacaatgctgtgttcgtcggacagctccaaataatcaagcacattatttgatacgatgttgtgggcgatgcgttttgccatgtcacgttcagggtggacgatgtgatcggccccgattttcgcaagcactttctcatgataatcgttctgcgctttaaccgtgatcgtgttcacgccgagttcctttaagatcagcgtcgttaaaatgctcgcctgtatattttcgccgattgccacaatgacgtggtcaaagttgcgcagccctaagtttttcagcaccgattcatcggttgaatcgccgatgaccgcgtgtgatgcgattttggcgtattcatttactttatcttcatcaatatccatcgccatgacctcaaggccttcttcacttaatgctttgcaaatacttccgccgaagcgtccgagaccgataacggcaaactcttttctcataacagtactcctttaaacaatatctctaataggaatagtatcacattttcggcaatgagttcatatagcgtttaagcttttctgaaaaggcgggcgataaatacagatccgctccgcgttcgatttcttcctgatagtgacccggaggcgcaatttcctcagctttatcaagaacgagaaacgtcaggacgcctctgtatacacggccgccggcacacacttctatgaacgcgggacggtatgtgtggttatcaacaccttctcttttgtacagataggttgccgcttcaaacgggagcttgtacagcacgccttcagttcgtcccccgtcttcaacaagatcggctctggaaccgtcaggacgccttaatgtgaatctcgtcgaatacccttcaacaaccgcccctccgaccggctcggcaaaaaagtggtcgacccccgcctgtttaaaccgggcattgtccatacaggagccgtaagcgaaataataaaccggactgtcatcctcccgtttcataaaacggtattctttccagtctccgcttttgatacggctgaatgaagcacactggtcgggctttacgacatatgcgaaggcggttttattcccggcatccgtcgtcacggcaacctcttttcgatcaaaatcagcataatacgcatccagcttacggatcatctgatgatctgtttcatacaattccccgtacacaaaagctgtttcttctaaagacgccgcaggctgacctttatccgtttcgtacagcacgccgtttatcgcagcctgctcgcacacacacggagcgcctttcagcagttcatggttttcttcacgcttccgtaacaaaccgtatacaaaaagaagcaagttatttttcctccttttggacagcagccgcttctaacggcagaatcacctgaaacgtactgccttctccatttttgctcttaatgttaagtttaccattatgctccttcagaattcgtaaacaaatcggaagcccgagacccgttccctgatcttttgttgagaaaaacggtttcccgatgttttcaagcttttctttcgacatgccgtttccttcatcctgtatgctgatcaccgcgtattcttcatcccgttttgtataaatatgaatattcccgccgtcaggcatcgcttcaatcgcatttttaataatattgataaatacctgtttcagctggttttcgtcaccgttgaccatacaggactcagtctgcctgaaatccttctcaatcacagtgttcgacagcaccgcgttcgtgtcaagaagcgtcgccacctgccgtaaaatatggttgagatgatgagcggtaaacgtcacggtctgcggcttggcgagcagaagcagctcccccagcacgagatcaatccttttaatctccgaaaaaataatatcaaaataatccgttctttccggatactgggctttcatcagctggagaaagccgctgactgacgttaaaggatttcttacttcatgggcgattcctgccgcaagctccccggcaatggccagcttttgagattgcatggcgaggcgttcgttcgtttccagaagctcatcgacagcttttttccgttcactgatatcagacatcgtccccaggcttccgacaaatttctgtctgcggtcataatacagcttataatggacttctccccaaaagatcgagccgtctcttttaatatatttggccgtaaacattcctgacggggactgctgcttgatttgggagataatataatcaatgatatgtttttcttttataaaataatcattatacatcgtgcccatacattcgctgatggagtggcccgtaatcgccgtccaggcctgattcaaatatgtaatattcccttgagcatccgtctgaaaaacgatttcctgcagattgtccatgatccggtttttctcatctgaaagcgcctttgctttctgctcgctgtccttcagctccgccagcagctgctttttattatccacataataagccagcagccagacgctgattaatgtgacggcggtaaaggtgatgtcaacgggccagttaatcggattccgttcaatcatataaaataaataatcccaaaacataataaaaatcattgccaagattaaggaaatgatacgcgcttgatattttcccatagtcccacctgccgctagcatttctacatatattgtaacattgttgactgcattattgactaaaaaatgataactattcccaattaattgagcaggttcgcttacttttcccgtgagtttttgcacaagttcataataaaaggacggaatgatgctccgccctttttgctgattatgatctatcttttaacgcttcctcgatttcctcaagcagcattttcgctccttcaggacttaaaataattttgccgttgccgtactcctgattttcgggagtaatttcccccgtcattaagcaaatgccgtgcggcttgtattttttcaagacaattttgtctccgtcaacgaaaaattcaatactatctttaatagcgatatccaatgctcttctcaattcaatcggcatgacaatacgcccgagttcgtctacttttcttactacaccaattgatttcatagaaatcccctacttcctttaatgtctcttctttatgtccaaggaaaatccttcataaacgtagacgaaaggaacggagcaaaagtttctcagcatccggaactgaatgtttttttacagaagaaaatccttttgaaatatgggatacagactttccctccttttttacaaaaacatttcattcccggcggaaacccccaaaaatcgtggtttttctcagaaactttaaatgtagaatcaattaaatcaggatagggattgggtgaaaacatgtttcaatcaactgagatcggaatcgacttaggaaccgctaatatacttgtttacagtaaaaataaaggaattattttaaacgagccttccgttgtcgctgtagatacaacaacgaaagcggtgcttgccatcggaacggatgccaaaagcatgatcggaaagacgcctgggaaaatcgtcgccgttcggccgatgaaagacggtgtcattgctgattatgatatgacaactgacttattaaaacacattatgaaaaaagccggaaaaaaaatcggaatgactttccgcaaaccgaatgtcgtcgtctgcacgccttcaggctcaacagccgttgaacgacgcgccatcagtgacgctgtcaaaaactgcggagcgaaaaacgttcacttgattgaagaacccgtagccgctgcaatcggggccgacctccctgttgacgagccggtcgcaaacgtcgtcgtagatatcggcggcggtacgactgaagtcgccatcatctcattcgggggcgtcgtatcctgccattcgatcagaatcggcggcgaccagcttgatgaagatatcgcctcgttcgtcagaaaaaaatacaacctgctgatcggggaacgtacggcagaacaagtgaaaatggaaatcggatttgcattgatcgaacatgtgccggaaacgatggaaatccgcgggcgtgaccttgtaaccggtctgccgaagacaatcagactgcaatctaatgaaattcagcacgcgatgcgtgagtcgctcctgcatattcttgaagcgatcagagcgacacttgaagattgtccgccggagctcagcggtgatatcgttgaccgcggcgtcgtgttaaccggcggaggctcccttttaaacgggatgaaagaatggctgacagatgaaatcgtcgttcccgttcatttggcggcaaatccgcttgaatcagtggctatcggcacgggacgttcattagacgtcatcgacaagctgcaaaaagcgattaaataataagattgtgcttcttttttctccggccggctcatattgtgagaactggagaaacattaaggaggaagcatatgcttagagatgtgggaagacgcgtagcagtagccgtcattttaagcggaattattttggggggtatgagcatttcactggccaatatgccccattctccggccggcggcgccgtaaaactgaatcacccgtaaagacgcagcaaaagctgtgtctttttcgtttgtgctcctttctttcctttatgaggcgatatttgatatgatgagaaaaaccgatgaggaggaatgaacgatgagttcgtttactgaaaagttacatacatatgctcagctggcggtagaagtcggcgtcaatgtccaaaaaggacagcatgtcgtaatcaatgcctcaactgatgtccgggaacttgtcagactgcttgccaaacattcttatgaaaaaggcgctaaaaacgtcacagtaaattggcaggacgatgaactgtccagattaaaatacgagatggcaccttttgaagcgtttgaagagtatcctgaatgggaagcaaaaggaaaagaagagctcgcgaaaaaaggggctgcgtttatttctgtcgtctcatccgaccccgacctattaaaaggcactgacggcaaacggattgcagcgttccaaaaagccgccggaaaagcattgcatacatacagacaatatattcaatcagataaggtcagctggacggtgatcggagccgcttcaacaggctgggcgaaaaaagtgttcccggatcagccggaagaaacagccgttcagcttttatgggaagaaattttcaaaacgacccgcgtaaatgaagaagaccctgttgaagcatggaaaaaacatgatcaaaaccttcatgaaaaagtggaacacttaaacaaaaaacattacagcgccctgcattatcaggctgaaggaacagacttaaccattgaactgccgaaaaaacatgtatgggcaggcgcaggaagcgtgaatgaaagcgggcacgaattcatggccaacatgccgacagaagaggtttttacccttccgcagcgtgacggggtgaacggcacggtttccagcacgaaaccgctgagctacggcggcaacattattgataacttcactcttacctttgaaaacggccgcattgtcgatgtgaaagctgaaaaaggcgaggagattttaaaaggcatcgtcgaaaccgatgaaggctcacactatctcggtgaagtggccttagtgccgtacgattcaccgatttcacaatcaaatattttattttacaacacactgtacgatgaaaacgcctctaaccacttggcgatcggcagtgcgtatgcctttaatattgagggcggcaaacaaatgacacgggaagagcttgtcaaagagggcttaaatgaaagcattacacacgtagattttatggtcggttccaaagacatgaatatcgacggcattaccgcggacggcaaaagagaaccgatcttcagaaacggaaactgggcattttaataaaaaaaggaggcgatcaggcctcctttttttatttcgcttcatacatttgcaagttggcgcagacggtttccaaaacaggtgtatcaactgccaagcctttcgctttctcaagcaaaaatccgtgtaaatgatcaccttccgtcaccctgcccttttccatatctctcagcatcgacgatttcatatggtaagacatgcttgtcaatgtgcgataactctcttcttccagaccaggatctttcgggatgccggcagccttgaaaatggctccgatttcagcaaagaggcgctttgccgtgttgcggccgccttctgtatctaaaatcggtccgaccggctgttgaaacagagtggtcactcccgcctgcgcggcaataaacatatattttttccaaatgtccttttcaatatcccggctgatgatgacatccgctttcacacctgcaaatgcgttttccagctcgttcatacgttctgtgcgttccccgttccattcaccgaaaacaaagcggtgggcagcgctcgtatgaagaatttcccctttgtcgttaagggcgctctcaataaagcagaggccgcccagcacctgccgttttgaaaaagcttcaaacagctggtgatagtgcctgtatccgtttaaaaaaggaataatgaccgacgaaggtttgacaaacggtttgacatcccgaatgacgtcctgcaaagaatacgcttttgaagcgatgataaccgcgtcaaatgctccttcttcgcccgccatgattaatttcggcttgattgaaacatcacctttttcacttttgacggtcaatcccgtctcttgtaattgttccgcccgtttcttgcggacgagaaacgtcacgtcatttcccttttctgcaagacgcgcgccgatatatccgcccactcccccagctccgacaactaaaaacttcatgatgcattcctccgtctcttttcaagttatgtattcatttattgtaacgggaagtcagaagattgaaaacttttttcataaataaaaaagcagagtctcccctgcttctttattacgcgtatagctcttcaagctttttctgtacatccgcgttttcaagaaattcgtcataagacatttgtttgtcaacaatgcctttaggcgttaattcaatgatgcggttggcaattgtctgtacaaactgatggtcatgagatgaaaacagcatagcgcctttaaagctgattaagccgttgttaagcgccgtaatggattccaaatctaagtggtttgtcggttcatccagaattaaaatgttcgcgccggaaagcatcgcttttgaaagcatgcagcgcactttttctcctccggaaaggacgtttgattttttgttgacttcttctcctgagaacagcatgcgtcctaagaagccgcgcagaaagctttcgctttggtcatgcggcgagtattggcggagccagtcaacaaggttcgcatcgctgccgtcaaaatactcgctgttgtctttagggaagtacgcctgagaagtggtcacgccccatttaaatgtgccgctgtcagcttccatttccccggaaatgattttaaacaatgtcgtaacggcaagttcgttgcgtcccgtaaaagcgattttatcttctctgttcataataaagctgacgttatcaagcaccttaaccccgtcaatcgtttttgttaagccttcaacccgcagcacgtcatttccgatctcacgttccggcgtgaaattgacataaggataacggcgtgatgacggtttgatatcatcaagcgtgattttatcaaggagtttctttcttgatgtcgcctgctttgatttagaggcgttggcgctgaatctggccacgaactcctgaagctgtttaatctgctcttcttttttcttgttggcctcctgagaaagctttaaagcaagctggcttgattcataccagaaatcatagttgccgacgtatacttgaattttattaaaatcaagatcggcgatgtgcgtgcacactttatttaaaaagtgacggtcatgggatacgacgatgactgtgttctcaaagttgattaaaaactcttccagccactgaatcgctttcagatccaagtggttggtcggttcatcaagcagcagaacgtccggcttgccgaacagcgcctgtgccaagagcactttcaccttttctgaaccgcctaagtcagccattttcttcgtatgcaggtcttcagagatgcccaggccctttaacaaaatagcggcttcactttcagcttcccatccgtttaattccgcaaactctccttcaagctcagcggcgcggatgccgtcttcatctgaaaaatcaggcttcatataaatcgcgtctttttcctgcatgacttcgtataaacgtttatgtcccataataacgactttcagcacttcgaagtcttcatattcaaagtggttctgcttcagaatggcaagacgttcgcccgggctcatatggacatcgccggtctgcggctccagctcaccggataaaattttcaaaaatgttgattttccggcaccgtttgcgcctattaatccgtagcagttgcccggcgtaaatttaatattgacatcttcaaataacttgcgatccgcaaaacgcaagctcacattatttacagcaatcatttagaatcctccatcgtgtctatcatcattaaaagtataccatgaataaaggggaagagaaatgtttccctgcgaatatacgggtttgaaaagatgcaggcaaacccggagccctgtgatacaatagatatatatacatattcatcacggaggaacaagttgaagcttttaacactcacagaatattgtcttatgattttctttaccggggtttttctggccgtcacaggctttaccgcacgtgacatcggcttgtacgtcggaatcgccctcatttatacgttttcgcatctcttttcaaaacggatgcttgaaaaacgcggcaaagagaagcagcaggtgaatctttttttcagcgttctggccattgtcggatcagtgctggccacggtattgttcatcgccgtcgccgcctcgtttgccaaataaaaaacgcctgctgtccaaatcgggcagcgcggcgtttttattttgtctgacgcatatcatgaaatgggaagaacacaaacttcgaggtgccgacgatccggttttcggcaattaaaccgagtccgttccggctgtccattgagttcagccgattgtctcccatgacgaagtatttgcctttcggaacctttacggggccgaaatctcccgtcaggttgactcccagttttttcgcttcttttttattgctcgcgaggtacggttctgcgatttttttgccgtttatataaagcgtgtcatttttcatttccaccgtttctccaggttttccgatgagccgctttacataatggactttcgatgtatcgccgttaataatgacgatgtctccccgctcgatttctccgatataattgacgcttttgttgacaaacagcctttcaccgtcatgtaatgtcgggtacattgatgatccttccactaagtacggttcaaacaggaaatggcggattaacagcgcaagtgcaaccgctataatgatggcctttccccattcccaatatgtgttggattttctttttaccgatttttcagaagtaggtttttgttcttcagtcaacgtggttcctcctagacgatcactgtttcagttcatgtaccatctttactttatcataactcatcataaaatacataacgcttctatgcgtacatgattgaaaaaagcgcccgtaaaggacgctttttgcttatttctctacaaccggttttttgacgattcccaagataaccgccgttataatcgctccgatcacgatgctcattaagtaaagcagcggatggttcgtaatgaatgcaacgaatattcctccgtgcggtgcaggaagcgttacccggaaaaattctgtcaacccgcccgctaccgcagaaccgacaacggctgcagggatgacgcgaagcggatcagccgctgcaaacgggatggcgccttctgtaacgaaagctgctcccatgaagtagcacgtaataccggcttcacggtcacgtttagagaatttgtgtttaaagaatgttgtcgccagtgcgattccaagcggcggagccattccgcccgccatgatggccgcatgcggcgcatagtttccggcatcgatcatcgcaattccaaaagtgaacgccgctttattgagcgggccgcccatgtcgatagccatcataccgcctaaaataatacccattaaaacaagatttccagttccaaggctttcaagccaatttgttaagaaattcataaacgctgcgacaggagtgtttatgacaaattgcatcagaactcctgtgataaaaataccgagcagcggataaatcaatacaggttttaatccatcaagagattgaggaataaagacaaacagctttttcagcaggatgacgacataaccggctaagaatccggcaatcagtccgcctaagaatccggcattcgcctgcgtagccataaatccgccgaccatacccggcgcaaatcccggacggtccgcaatactcattgcgatgaatccggcaagaactgcaacaatcagctttaacgcattaccgtcaccaataaagttcagtgctgcagcaaacgtgttgtatgtcgggtctttcggatcagctgaatgaattccccagaagaatgagatcgcaacgagaattccgccgccgacgacaaatggcagcatgttgctgacaccgctcattaagtgtttatagaaagtacttccgatgcttgttcctgatttctgtttcgggccgtcctcatttgaagcggaagatcctccgccgctgccctcgtaaatcggcgcatcttggttaacggctttttcaatcagttcctgaggacgtctgataccggccgtcacaggcacttgaagaacatgtttgcctttaaagcgttccatttcaacctgtttatcagccgccacgataatcgcaggcgcgtcttcaatttcttgagccgtcagcttatgtttgataccgcttgagccgtttgtctcgactttaatgtcaacgccgagctctttcgctttttccttcagtgcgtcagctgccataaacgtatgggcgatacctgtcggacatgccgtaacggcaaggattttgccttttcctgacggcgctgcctgttcttcctgctcttcttcttcctcatcgtcatctttgtcatgctgattgatgatgtcaatgatcgcatcttctgattcagcttcaagaagctgtttgcggatttcctcacgcatgagaagcgttgaaagtcttgataatgcctcaaggtgcgtattattcgctccttcggttgccgcaatcataaagaccaggtgtgccggctgaccgtctaatgattcataatccacaccatcttttgaacggccgaatgcgatggccgggttaatgacgctcgccgtcttcgcatgaggaatggcaatgccttcgccgattcccgtcgagctttggctttcacgatttaaaatggctgctttgtaagcctctctgtcatttaatctgccggctttgtcaagcactgtcaccatttcatcgataacgttttctttctctttgctttctatattgagatgaattgtatctcttgttaacagctcagttatcttcacttttcttttcctcctctatagacgtgtgactttaacttcaggaagaagctgctgtacaaactcttcagttccgagttcttcagaaaatgccgtcgcgcttccggaagcaactcctaaacggaacgcatcttccaaaggcagctgttttgaaattcccgcaaggaatcccgcgacgacggaatcacccgcgcctaccgaattgacaagctttcctttaggaacattggcgaggaaaaccgcctctttcgtaaataaaagcgcaccgtcgccagccatcgaaacaatcgcatgttcagcgccttgttcaatcaattttttaccgtaaggaacggcagcttcggctgaatcaatgaccgtattgaacatttccccaagctcatgatgattcggtttcatcaaaaacggtttcatttctgtcgctttcatcagcgcttcaccggagatgtccaccactacccgggcattctgctttctgcatgcctcagcaattttttcatacgtgttatgcggcagggaagaaggaatgcttcccgctaaaacgacgatgtctccttcttccagagcggagaactgttctaaaaaggcattgaacacttcgtctgaaatcgtcgggccctgtccgttaatttccgtttcatcgcccgttttcagttttacatttatacgcgtgtcttcatccacctcagaaaaagccgtttccagaccttcctgctgcaaaaatgacgtgatatagtttccggtaaatccgccgacaaatcccaatgcttttgacggcacatggtgtcttttcagtaatctcgaaacgttgatgccttttccgccgggatacttcgtgtcatagctggaacggtttaaaccgcctacggcaaaatcttcaacgtgaacgatatagtcaacagacggattgagggttacagtgtaaatcatggtttcactacctttacgacagttttttcttggtaattatcgaatgcaagttcttcagcttcagtggtaatgatagcggcatcgcccaaggcggcgaacgctgcgaaagaaatctcgccgaatttagaaggatcggctaaaacatacgcatttttcgcctgtctcacagcctttgtcttcagaagagcctcatccggatcgggtgttgtaaagcctgcttcaatgtgcacgccgttcaccccgaggaagcttttgtcaaaacggtactggctgaccgccgttaatgaggcgccgccgatcatcgcacctgttctatgcttcacatatcctccgagaagataaaaggggatccctttccttattaaagcgtcgatatgcataactccgtttgtgacaaccacaatgtccttagatggatctataaaatcaatcatgtgcaatgtagttgttcccgcatcaagataaatacagtcaccttcttctaataaagatgccgcttcttctgcgatcttcagtttatcctgaaggtttttggaggatttttcaagcatatcgggttcttgcctgctgttggaaagtttagacgccccgccgtgaacgcgctttaaaaatccgcgctcttcaagtgttgataaatctcttctgatcgttgattcagaagcatttgtcatgcttatcagctcttgaatcttcaccacatcacgcttttcaatctgatcaataatcagctgatacctttcaggagtgagcatattccgcctcctttggaaacgtattcatttcggctgcaagataattgtaaacgctttttttacttctagcaactaaaatcactcaaattcattcaataactatcaaaatctttcacatttgttcatattaacgtatgtacatagggtttgtaaactgtaaattcgacaaaaagggggacaattgtatgacattttctttttatcataaatgaaaaaagtctattatattcattcaatcattaaaacacaaaaaaaccccatgcagactgcatggggcgccggttattcataccgtaacgcttcaatcggatctaagcgtgatgctttgttggcgggcagcatgccgaaaatgacaccgatcagcatactgaacagcacaccgatacaaaccacctgccaggaaacgagcgacggccagcctgcgataagggaaacgagtgatgctcccccgtagccgagacagattccgattaagccgccgattaatgtaagcacaacagattcaattaagaattgtgtcagaatctgtcctctcgtggcaccgagcgatttgcggatgccgatttctcttgtccgttccgtcactgatacgagcataatattcatgaccccgatcccgccgacaacgagagaaataccggcgatcgaaccgatgatcgtcgtcataacggtcgtgacctggccgattcccgccgctatttcttccatattcatgacttgataggcctcttttgtaccgtgattgtcatttaagagacgggccgcttcttttcctgttgatttgatttgatcagcggactccgtctgaacggaaacgttgctgtagtcgttagtaccgaaagacgttttcagcatgttgaacggcacatacatttcactgagtcctaacgataaaaagccgctctcttctttcagtacgccgattacttcaacgggctgtccgccggcccagacgatttttccgagcggagacgttttcccgaacagcttttcagccatttttttcgagatgattcctgctcttttcccggaaagaaaatcattgtccgtaaatgtccgtccatcttgaacgtccagcttttttacgtccatgtagccgctgttaatgccgttcagcgtaatatccgtgtcttcttcatggtaacgggccgtcatggattttaccgcggaagcgacaacctgctttacgccgtccactccttttaatccattaatatcttcttctgtaaaactcgcttgctgtaaggcgttcggattggctgttaattcttcatcactgggcatgtaaaacaattcaatcgtattgcccggcccgctgatggattgcttcagcatttgctctccgccctggccgacagccacaacaacaattactgaaccgacgccgataatgattccgagcattgtcagaatcgatctcagcttgtgagctcttacggaactgagggccatccggagattttctgacaggctcattcccccactctcctctgctcagcatcgcgggaaacgatcatgccgtcacggacgaaaatcactctgtttgtacagtccgccacttcaggctcatgagtcacaagcaccacggtcacgccctctgcattaagctctgtgaactgctccataatggaaatgcttgttttcgtatccagcgcgccggtcggttcatcagctaaaatgagcttcggttcgttcacaatggctcttgcaatcgcgacacgctgcttctggccgccggacagctcattcggcatgtgacgcatccgatccgccaaaccgactttttccagcgcatgctcagcccgttcctcacgctcttttttgccgataccggcgtagatcatggggagttcgacattttttcttgcattcaatcgcggcagcagctgaaattgctgaaagacaaatccgattgatttgttccggaccgccgcaagctctttttcggtgcatgaagaaacatcttcgcccgcaagcctgtaactgccggacgtcggtctgtccagacagccgatgatattcatgatcgtagattttcccgatcccgacggtcccataattgacacatattctccttcttcaatcgtcaagtcgattgaacggagaacatcaaacgtctccttgccgatctgatagctttttttcacctttgaaagctgaatcatctatgctttcacatccgttccgtcagtcaaaccgtcagccggattcagaatgactttatcatcctttgaaagcccttcttttatctccgtaagctgatttgcggtatcgccgactttaactttcacgcgtttggccttcccgtcttttaccgtaaagacccagtgctcatctccgtcttttttgaccgcggaggacggcagcgtatcggctttccgtttgtctgtttcaatgttcataattaatttaaaccccggcttgccctccggaaggtttccgatcagcttaacctggaacggatactgcacggcctgttccgtactttcccccgaagcagcgcttgacttttgatcaggaacgagtccgacagccgccactctccctttccacgttttacctgggatggcgtctgaggtaattgtaacgctttgtccctttttcactttcagcgtgtcgtattcggacaaattgccggcaacgatcaggtgttccgggtctcctatatgtataaccggttcttgaatatccgattttttagaagccgcttcttgatttaccgagattaccgtcccgtccatctcactcttaacattgagattcgccacctgattttcaagagactgcttttgcaaatcagattgctttaattcgatttccgccgttttttgctgaagctgcagatcagtccgttcggattcaatttgttttttggcttccgcttctcccacttgttttgccagatcttgttccttgctgtttaatgctctgagtttttcttcaacttgttcgatttgcatccgttttgattgttctgtcaactcattttgttctttatcaagattgagctgctcatttgtatacgtgactaacgacgaccctttttttactttgtcgccttcttttactttcactttatcaagagttcctttatccgcttcataaaaaacatactgttctttagagaatttaagtgttcccggaaccataaccgtagaggagatttctctgttttccatggttccggtttcgatttttttcccggcgctgccgcccgcgggagcggcagacttataaatattgataccgatgaatactgcaacaattacggcgatgccgattccgatccaaatttttttcatgttatacacctgctgtcactgaacttaacagtcctccgactgccgaaactaaaagcataataacaaacaggacaatcgcggaagtccaggccgcttttttcgaaatgccgcctgtatagcgaagtcccaaagcgagcagaatatagctccagatgctgaaaatgtcgaacgcgcttaaaaagaccgcgacgccgcctccggccggtatgacactcgccaaagatgtaacggcatacaatgagcccgcaccggtaaaataagtgacaagaccgttaataactaagccgatattggtaataaatgccgtaaacaggctgagtgagagcatttttttgtaagttgttacgccgcctgaaattttaacgcacagccagtaaatgagcggaacgataaacagagcgataatgcccccgaagattcctccgaacatcgagccgaatttagcaatggttttggtcatttcaatctgatcatccgacaatccgtcaagagatgagctgttcagcacttcttcataattcatccccaatccgcgcaaaatactgccggccgcgatgagaatgatgacaatcaggagaggaatgccgatgaccggcttctcttttaatcttttaaactgcacaacaggacttgtaatgacgccgaaaattgacggcttttccgttactgccgtattgcttttttccaggtttggttccatattgctgatgcctcctatgtattattctgtttatacgtacgctttaggctgagagaagtttcaatttttttgccgtttgcgtatttatgctaaattgtaacacaaattctcagctttacgttccataattatgtaaaaaaaagcattgtcagaccggtatgacgggaggttcaaagccttgtgaaggcactgtcttcagcctattcatgcagtcaaaaccagctcaatcgcaaatccctttaaatcccatttagatattctctggaattcagcgcctatatacaaaaaagccggatggcaatgatgcacatccggctcttttttcaccctccgcttacaggagggataaaggcaatggtatcaccttctgttacgatgctgttgtcttttacatatgtttcattgattgcgatcatggcattgtcaatcgtctgaaggccgtaccgttcctttagcagcgtttttacagcagacgccgccgtctctttttcgtcaagttcaatgaccggtgttcccgcctgctccgcaagcccggcaaacaataatactttaatcatcgcgattcccctttatgcaaatccggttttccgttcggatagggcgttgtttccagctgatcgcctatccattcttctccgtcttcccagatttcttttttccatatcggcacaatctgttttatccgttcaattgcatattcattcgcctcatatgccgcctttctgtgcggagaagacacggcgattacgaccgctgcttctccgatatcaaggacgccgacacggtgagtgattgcagcttcggctccttcccatttcgcactgatttcatcgccgatttgagaaagcatttgaacagccatcggttcatacgcttcatattcgagacgcaccgtccgccgtccggcagtccactctctgaccgtgccgataaacgttgtgatggcgccggcttcacgcttttcaactttttttacgatattttccgcaatgataggttcccttgtaatttgaaaacgttccatttatgcagattcccctttcagctgcgaaagcacaaacatcatggcagccggatcgtccgcatggaaaacgggcatgcctgcatctgccggcatatgctccgtatttctgctgataaccgcgatcacgcgctccaaatgcttcagcttttgccaatcttcgctgtctttgatcataatgattttcggatgcggcgcatgtttaaatccctctatgagaagaccgtcaattcccaggcattcatacagactgatcaaacccgccagatcccatttttttcgcgccgtaagctgcaggacgccatccccttctactcccgtaaccgcggccccggcttttgaaaaacgctccgagtcttttccgtcagaaaaaggttccggttctccgccatgtccgtgatgttttaaacatccaatatcgcactctttcggcgccgctttcagcacacgttcaataaacgttgttttaccgctgttttgaaaacctacgatctggacgatcgggaaagaattgaccacggccattcacttccattctcatcacggatgaggagcgcgtgaaccgtccggcccgcttcataccccctcgttcctcccggcagaaggataaacgcgtttgcttcggccagagatgtgactgagcttgatttgtcgagaccgaccggtgacgccatcatctttccgtccttatgataaacaaatgccctcacaaatctcgtaaacggattcggtttcggaaagtcgtttgttaacacggcttccgcccatccggaatgaggtttttcattcagaagccacgtctgaatcatcggtttgacaaacagggtgaatccgacataacatgcggacggattgcctgaaaggccgaacagcagcatgtcatcggcccgggcgacagttgtcacgctccccgggcgcattgccactttgttaaaaagaacttccgctccgagcttattataaatgtctggaagaaaatcaaaatcgccgactgacacgccgccggtcgtgatcagaaaatcaacttttttcatagcttccttcaccgcatcatagctgtcatcaaaatcatcggaaattttccctaagttcagcggcaccgcgcccgcttcaatgacctgggcatacaccatcgcagcgttgctgttgcggattttccccggctcaagcggatcgctgacatgaagaagctcggttcccgttgcgataatgccgacaaccggctttctgaccacgggaacggaagcatagccgaaggttgctaaaagagcggttacgcccggcgtgattttcgtccctttttttaatagcgggctgccctttttcgcatcttctccttgatatgaaatattatcgcccgcatgaaaagggcgtttcactgacatgtaattcgtcccgttttcagaaaacgtttttgtcagctcaagcatcactacggcatccgcgccttttggaatctgcgcccccgtcataatgcggaccgcttcataagggccgagttctttttccgatacggcgccggctccgatatggtcaatgacttcaaaggtgacggcattgtcacgggaagccgtttttgaatcgctcgccctgatggcaaacccgtcatacggggaacggttaaaggccggcacatcatgatccgccttaacatcctccgccaaatagcggtggagactgtcctcaagcgccacccattcggtatccccctgttttttataccggctcacccggcggactgcttcgtccacctgaatcggcgttcttttttcaagcatagcaatatctccccttcctacagtccgatcaccctggccagaactgaatttgcttcttttatatcgtttgtaccgtgaatcaaagcccgtccgtcctgaaaaataacgattctgaagcgctcatacgccatgtgcagcagaaattcatttgcttccactttaccgatctgcttcagacgtttgacaagctcttctttatccagcctctttaaggcttccgatctgatttgaacggtgtctcttccgcacagcacgcttgctttcggcctgttttcaggctgcagatacggatatacgggctccgcgccgcaggaagggcaatgatcccgtttgatctgatccacatttatgctcatattggtgttattccacacgtcaaacgtgaaaaagcgccgatttaccgccgcatgatttcctgtcagcaatttcagcgcctcagcctgctgataagcggagacgatatgaaccgccggaggtatgatgcctgctgtatcacatgtcgctccgcccacgggcatttgctcaaacaggcaggataaacacggcgtaacccccggaataatcgtcatgcacattccctgactgctgacacaggcaccgtaaatccaaggtgttttcgttttcagcgccagatcattgatgaccattctcgtttcaaaattatctgtcgcatccacgatgcaatccgcttgttcgatcagcggttcgagcgtttccgccgtaccttccgccgcgtaagcatcgatatgtatatcactgtttaccgccaaaagacgcgccttggccgccattgctttcggcaggcgctgtctcgcgtcttcttctgtatacagctgctgtctttgtaaattgctccattccacataatcccggtcaataatcgccatacggcccgctccggctcttgccaggccctctgccgcggctgttccgagggctccggctccgacaatcaggacactgctgtcagccagcgcctgctgccctttttcccctatcggcttaaatcttgtctgccgcgaatagcgctcttccatctgtgttgtccccttgcatttttatttccatcataccatgtttcttcccgatcagtcctgatttgaagactcgacatgcgccaaaagtctggtgtaatcgtcccgtgtgttgatattagcgaactcctccggcccggcgccgatgtcttcagcctgcacataacagacagacagccgtttcaacgtgtctgtcattttcagtttgttttgtgtcagctgatcaaaaagcacatcctgcacccgtttatggtaaaccgccaagaggggctgctctctgttttcacaaaccggtatgacagcatccaggtttccggtcagcttcttttcaagcgcagccatcgtctttcttgtcacgagcggcgtgtcacaggatatgaccgtatatgtttcgccttccgtttgttccattgccgtatatatgccggcaagcgggcccattccccgaaaccgcggctcatcggcaaaaacatgccgctccctgtttgataagaacttttttatatgctcagggcggctgataatcaccgtttctccgccgccgaaggcttttttcgcctgttcataaaacatgccgcccttccactttgcaaaagctttcggttctccgaatcttcgggaagctccccccgctaatattacattcacccgtttcatgtcatctctctcccattctatataaaagcatagcaaacgcctcagccgaaatacaatattacggtgcttgtctgtttaattaagaggaatagccgttgttcctttcccatattgtagtgttaacatcatgagggagatggttcttatgaaaatatcaggtccgtttttccacgacacttctcaagagaacctttacttgaaatctgaactttccagatgcagaaaattaatttcagaatttgaagcaagctacttccatcagaaaaataataagcttcaggaggaaaacgccaatattaaagagcggcttcacaagctttctgacgaattggaagccatggctcaaaaacacaaacagacaagtgacacggaacgttctttgcatgaaatcagagccgggctgctcgataaaatcgtcattctgcaagaactgcttcagcaggaaacgtttcggcggaaaaatgagatggaagaaaagcaccgtctgcatcttacaaatgtaaaatttgaagaagaaaataaaaacttacatacccgcatccgctcacttgagaccgccattcaaactgaacggacttctcacgaagatatgaaacagcgttatcatgccgctgcagacgaaaatacccggcttcaaacacaaatgatagaaaaagaataccagctcaaacatattaaaatagaaattaatcatatgagagatcgaatactagaaacaaaagaacggcttgtagaaatagaaaaaacgaaagaaaagttatttcaagaaaccattctttcatataaacggcagctggacgaaagtgatgcttggattgccggccattttgctgatattgacagccgcacggcggaaccggcggaacaagctctggaaatcccttctgtttccaaagagactgttcaggcagaagacttgcttaaagccgttaccgaacaagtcatctccctgcaaaaacaatttgtacaatcagagtcccgcgatcagtcgtttgatgaaaaactggatgcgttgaaagaacgtgctgacggcgaaaagcctttccaaaaatatgtcgtcaagcttgaaaaaaaacctggaaaagatgcgtcacttccgcagaataagcgggaaagcgcaaaaaaactgcttgagtaacgcaagcagtttttactgttttattcagcagccgtatcatttgccgtttctgctgtttcctgagaaatttctccctcaagaatatattggccacggtatggttttttcacttccggatacattttaattaagctttgcataaatgttgtcatattaggaatttcaaggccgctttccttttcaatttccttttgcagttcggaacttttaatcgctgcattgtggcgtttcaatgttttaatcgctgcttcgcgcagttttgccgcttttgatcccggtctcgccgtccctcttcttcttcttgtagaaccgtctggaatgccggcgggaagagacgtaatagactgcatctgcggctgggaggattgaggctgtgtctgcggcttttgatagcttctcatttcctgtgctgcaagctctgcaagcaccgggagagagtcactttttttctccggacgaaactctttttttgtatcggacaggctgcctgtattgtctaattctctcagttttgcatatattttatcacgttctatttgatattcacgaatgacttttacctctgcttcgttcaattgttctaaacgtaagcgcagcgcttctctttcattaaacatgtgtaaaaccccctgtcaaaaatttaaacgcttttattaagatattagattacaaaagtaattttatcaactattattttatcattttactattttatttactctatgaaaaattgcttattttctgaaaatggtactttatatacaaaaatcccttatcatataggggattctggacaaagttccaatttattcaaccatttcaaaatataacttgaaattacttgtttaatgaaaattagcgtgatatctacaattttcgactataatatgtaaaagataatgatatcgataaaacaagcggtacagcgtgtttacggctgtttctcttattttttaagcacacatgccatattggaattttttatcaaataagcacaaaaaaaccctgttacctaaacggcaaagggtttgcagaaccgagacaatagtccgacggagattgtcccgattactcagaagcctgctccgtttctgaaagtactcggctgacacgtttttcaagcattttcatcccgcttcctcccgcttgaaaatggcggagctgtccggttttatcgaaaaggtaataagccggcacatattcattttcaaatgcttcagtcagcgtatgatcgctgtcgacgtaaatcggctgagagatatcgtgttcagccgctgttttcttgattttctcaagatcaagatcgtcttcggaacggggcatgtgaacggccaccacattcagctgatctttatatttatcacgaaattcgttcatctcaggcatcgcttctttacacatgcggcagctggcggaccagaagtgaatcagtgccggctttccgccgaccagctgttccttcgtgacttctctgttaatccatgctttagcgcctgtcaattcaggcatttgctgacgtaatttcatcttatttccctccttatgaaaaaggttttttgccggggctttcagtttcgccgggcaacgttctcctgttttccctccaaaggatatgatttggctgaatcaccatgttaaaatgagtgtggcgattccttagttcatatcttcacaaaaatgatgatattgaaaccgtgcaatatgaacaaatcataaatgaaataactggtttctattaaaaggtttatcttattttaaaaacgggtatatcacttttagctttttccgcaaaagacttgaaaggaagacatcactatgattgatttaaaacactttgactgggccgggcttctcacatctgccgggattttcatcataaagctggctctcattattttagcgtactttattttccggacggcaggaaaaaagctgatcaagcatctgtttcagaaattcgagcaacaaaacaacctctccacaggccgcgcttatactttgcgaagcctcgcgcttaatgtatatggatacatcttgattttcgtttttatcgtgatgattttggatttatttcactacaatccgagcgctctcattgccggcgccggcgtggtcggtctcgcagtcggcttcggggctcaggggcttgtcagtgacatcgtcaccggattttttatccttttggaaaaacagatcgacgtcggcgattatattacggttgccggctacagcggcattgtcgagcaggtcggtctccgtacgacgcaaatccggagctttgacggcacgcttcactatcttcccaaccggggcattacgaatgtgagcaaccattcccgcggaacgatgcaggcgcttgtcgatattaaagtgccgcttgaaaaaaatcttgatgaaaccattcaaatcctgcaaaccgcgtgtgacaaagcagccgctgagctcccgcagattaaggaagggccggacgtcatcggggttcaggatttaagcacgtcagaaatggtgatcagaatcattgccaaaacagaaaatatggagcaatggcggattgaacgcgtactgcggagagaaataaaaatcgcgctcgaccgttttaaaaacgccgcttccgccgaatagaaaaaccgaagcgtaagcttcggttttttctttttaatgaaattttttttccacttcgctgcagatttcgtcggcggtcattccggaagccgtaatgacgggagcctgagttgacgtatcggcaattccttggacattgctgtcaagtccggttacgacacagcagtcacaattcttcgcatcctcaggagtcttcatcatcactacgtcatatcctttttgttttaacgcctgttctacatccgataaagattgttcaattccaatttttttcgtcatattgaacacctccgttatgtagaatgctcaattattgttagattattcttcttttcggatttaattggcatacttcgaaaaatatccgaccatgacatttaccgcggtttccatcgcatcttcatccgggttcagcttggcgtgatgaagcccgtgggatgaatcggcccccagccagaacataaagccgggatattttttcagcatatagccgaaatcttctccggtcatcgcttctttcgccgttctcacgtcagcaagctgatgatcgctgacaaattgcataaattcttcggtcaggccgcttgtattataaacttgatgataaacggacggatacgtgacttttcctttgcatcggaagccgatttcaattcctttgacaagctcttcaatccgctttttcaccatacgcattgattcctcggaaagcgtccggatggttccctccagatgagcatgctctgcgatgatattttgcgccgtgcccccggtaatcgttccgacagttatcacagcgctgtcaagcggatccgtatttctggatatgaccgtttgcagctgcgtgacaagcgtgctcgcggcaacgaccatgtcgtctgctgtatgcggatatgccgcatgcccgcctttcccctcaagatcgatgacaagctcgctcgtattggcaaacagcaatccgcttttggtggaaattgtacctacaggaagctcaggtgctatatggagagcggtaatcaaatccggcgtccattttttcagcacatcgctttcaagcatcggttccgctccgcccggtccttcttcagccggttggaataaaaagagcagatcatgtttgacgggatgatggacaaaatgatcaataatgccgagcgcaatggtcatgtgcatatcgtggccgcatgcgtgcataaaaccggggtgttcagatacaaacggaagccccgtctgctcttcaatcgacagagcgtctatatccgctctgtaggcgagcattttttccggagccgtgccgttgactttgacaaagatgccggttctccaagtttcgatttcaattctttcctccggatattggttcaatagattcagcaggtactgttgggttttatattcctgaaagccgatctccggaatgcggtgcagatctcttcggatggcaatgagccgctctttttccatatgtattcctccttgagataagaataaggcgtggattttatcatccacgcccattctatcaaaccattccttacagctggcgtaattcctgtttgatttctgttttgccttttgttttttcatcgatatctttgatttttttcgcaggtgttcccgctacaacggtatatggctcgacgtcatttacaacgatggctccggcagcgacaaccgcgcctttaccgattgttacgccttcaagcacaaccgcatttgcgccgatcacaacgtcgtcttccacgacaacaggcttagcgctaggcggctcaataacgcccgctaatacagaacccgctccgatgtggcagtttttgccgacagtcgcgcgtccaccgagaacaacgttcatatcaatcatcgtaccttcgccgatgactgaaccgatattaatagatgcacccatcatgataacggcattgtcgccgatttcgacttggtcgcggataatagcgccgggctcgattctcgctttaacatcttttaaatcaagcatcgggatcgcagagttgcggcggtcattttcaatgacgtaatcctcaattttgtctttgttttcttcgattacgcttttaatttcagcccactcgccaaaaacgacgccggattggccgttcaggaatgttttagcggaatcgccaaagctgattccttcaagatcgccttttacatacacttttacaggcgttgattttgtactattttgaataaatgaaataatttcatttgcatccatcattttcatatgtattgtcctcctctgattttctacctcattactgtaacaaaggaaggatacaaagacaagaaaaaaaggaacaagcctttattctgccggctggctgcacagcgcggcaaactgtcttccgaattcccggagctcttcttcctcactgccctcagggttgttttcaattttgaccgacggcagcaccacccgcccgccgcgggttttgattactttttccaattcgtcaaccgccccgcaaaaaaactcataggacgtatctccggaaccgaacaaagcaaatgtttttcccgtaaactccaggttttccatatcttcagcaatatcgagcatttcatcaggaagatccccgtctccccacgtatatgtgcctaataaaatatactcgtaatcattaaaaagttcggcatgaatatccatcgcttcatatctgtctacggatgcttgtgcttcgatcagccctttttcaattaaatccgccatcgcctcggtgtttcctgacattgtggcgtaaacaagcaatacattccccatcttcgtctctcctttatgcataaaaactaatgtgcgagccgaaccgcctcatacggtctgacaaacttactttcgtaaaggcccgcgcaaaaaaagttttcttcccggttggccacccgccatccgtgaccgcggatcgtatcaaaccactttaattcaccggcggcgagatcagcttgataaatacgcgaaaatccgttttcgtcctgtgacgatgtgacataaataatcccgttatcctcagaaacgtcgagaaatgatttttcccgtacggcgggtccggctgtaatggcaaactcctcttgcgtccgcacgtttcggacggcaacctccccccgttctccctttgccgcgccctttgctgcaatgagccagtcattctgatacatcatcattgaagccgtcatgcgctgcctttcgcggcttatacgccggatgcgttcttccgtcagatcatacgcccaaatgccgccatgattcatatgaatccgggtgccgatataaatcgtctgaccgtgtaaacaaagcgaacggatgacaggcggctcctttaattgtgaaaagggcttagccacatgccaagtgacgccgaaatcatcagataagtagaggcagtatgtgccgtgcgcacagacaaacccgtcattccgcccggcaacggcccatacggaggcgctggtcggaaaacgggaggccgtccaagtctttccctgatcggctgatctgaggacggcgcctttttctccagccgcgaatatgtagggccctatgtaagtcagcacatgaattctgcttttcactcggaacaatcttttccagccttcttccgcggaaaaatgaaaaataccttcgcctttcacagccacaaaaaatcccgaagatactgatgccatgacagccgtcgcgcctttatgaaacatagcaccggtctccgtggtgtgcggcccatgcaagaaaaccgcggacaaattctttgcagcattcctgatcctcagccgtctcgggcgccagctcgattttcagcgtttccggatataaattggctccggcctgttcaaacgcatcgcaaaacagcgtgaccgcttcgcaaaacttcgggtaggcgtgatcgcctgaaccgaaacaggccgttttcagtccgttgagctggctgtgcagaatatcttcgtaaaaatcttccgcttcgtaaggaagatcaccgtccccccatgtatacgtgccgacaaaaacataatcatatgcttcgagagaatccgcatctgcttcgtccatgtcaagacagtcaactgctatctgatgcccgctcagtgtttcttttataatgccggcaatatcctctgtattccccgacatgcttgcgtatatcattaatgctttttgcatatgatcacctcgtaattgataatgattttcattaacatatataacactttaaatgataatgattttcattgtcaataaaaaataaaaaaaagacagcatgattgctgtctttctaaaatgggcgttcctgcttcagcatatctttaatgacagaaacaaaagcctgcacctgttttaattcaaatgccggctcatatccgagcagccatgtgtcacggccgatcggatggtcctttgtatcaagcaggggcattttatttactttatcttcctcttctaaggtgactgacggcagaatggcataaccgatcccgtgcagcgccatctgcttgcacgtttcaatctgatcgacaaggatggtctgtttcggcgaggttttgaatttttgatgccaccaatgctgaatttcctgaaaatatgtactgtcacttttgaattggatgaacggccggtcggtatgggcaatatcatcaatacaggaaatttccgtatcgaccaaatataaatgatcggtcattaaataatctttccggcctttccattccggatttccccggataatgccgatatgtacctgatcttcatacagacttttcagcatttcgctgctccaccctgtaatgagagagacctttgcattcggatatcgttccacatatgtttttaacactttcggaagccagtgctgcccgataatcgaagcgacggcaagctttaatgtgccgtgaatctcaccctcaagttcatcaatgttttctctgattctttcttgccgatccgtgacgtcatttgcaaattgtatgattttttctcctgccggcgttaccgtaagtcctttttgagacctaagaaagatctttgttccccaggctttttcaatggtctgcaatcgctgggacagagccggctgtgacacgaataaccgttcggcagccttcctcatgtttaattcctcagctaaaactacgagcatatgaagctcttgaagctgcatgttgtcctccttttcaatgccttttcgtatttcttatctaccattctaataaaataaaggctgccgaggcaagcgccactcatatgtatgcgttttctttttctggcatgcaaaagaacaaataggctgatcgtgcgagcctacttattcaatgatctgatatggctgctcaactgctttaatacgactcttctcgtgaaaatgccttcaaagacgccttcatcattttcaacgcagacaaagccgttgttaatgaccatgctgaaccctttgataatcggatcattgatgtggagacggggaatgtctttcagcatgacttcctcaaccgtaatttgatccagcttctcaaactcgatccgttcaagtccgaaaatgctgttcataatcatatttgtcccgatcaaaccgtgcagacggtacgaagcgtcaaggacgggaatggcggtatagccggttttcgtcagcactaatagagcatgttcaaggttgtttccgacttgaacgtgcgccactttatccgcctcgatcataaattgtccgactgttgcatcaagaagctgatctgattgtaagctaatcatgtcacttcgacccctttacatttttcatcaaagcatgtattccctatattgcaataatataaacattatcattttttgtcgaaaagtttccgtcaataaaaaagatactctttgcaatcgagtatcaatttataggccgctgattaattttcgttccgaaaacggtcatagagcgttacgagttttttataagtggttccatcaacgctttttgaccctgcttctatatcattgatttcgctggtcaaaagctcaatggcatattcttgattgatcaggatattcagcagaagtttctgttcttcttccgtaaatcgttcactgataagactcatacgtaatcaggccccctatttttaactgaatacctctgaaagcaatgtgaaatttgctttcagctctaccgctagaataagtaaacagaaaaaaatcgtcaaccgcataattcgacattttgcggattctgtatgaaatattattttgtgtaacgattggcataactgaatgctgtgcaggaatcgggcttgattttcgcttcaatgcccatcgaggtaatgcggccggtcatttcttgtatcaattcttttgtcagtcctttttgaccgatatccagatgcacttcaaatgaaagatccgccccttcatccgtaaaaggcaagagcaaatctgtcagttccataagacggtcgtcgaggatatgcgcagccatctcctggctgaacgcggtttccagcgaaattttttcgcgaaggctatgtatcggtcttgcaagatcatgatttttcaaacagccccaagctcccttgcctgtacggtgcaagtgtatagctgtaataaactttgtgaagtcgcggtaaacttgtgaatcagtccctacagacagcacgtatgctgaacgggggtctttattgacaaagcgtttcagccgctccgtcacgtcttgaaaggtcatctgtgcctcagaaagattataaaacagaaaagaatcagccatgtacggacactcctctttccagagtctacaaccaaacgaacaagcacgttcctttgcataatttaataaagctccgcttgcggaagaccggaagcttggtcagcctgaaaaatcaaatcaaattactgaaggagctcaaaaatttcaatagaaatcatgtcaatgttatcaaacggatatgtgttaggtttttcacctttttggaaaaccgtcagttcaaacgtttgatttttttcgaaatatttaacactgcaaattttttcgccgttaacttcaaaataacgctgcatcggctcgttagccgcttccgctgtttcttgcagactttgcagccgcgtgatgatacccattaattgtgacattctaaaaaaagactcctttcaaaaaacaacttcaaatcaacaagtatttattataatacaagttctacagagcatcataccataaagtagaccgggatggcattttcccgctggattttcaaaaagaaataaacgggaaaaccgtgttttcgaatagtttgaagcttttttcggaatgtcatacacctttcaaaaataatttttcgctttttgagccgccattatcagatgtatgtaaggagaagcctttttatgcgagacggcataaaaaaacttggcgggggtagcgccaagttttttcggatcttgatctgatagaggggttggggaacagagagtaacttctctctataactaaatgataatgattatcagtatcattgtcaatcgttttttaaaacttttttcaaatgaacaaaaaaagcggcatacagcagccgctttaaagtaacccgtcctgttcatataaataagagtaaggcagatcgataaataaatacatattgtcatccatcgggtatgaaaaggttctgatcatctcacctgtctcaatatcactgtacaggtcactgaaaaagccttttcttgaattccgcatcttcatgatgttttctaaaaagtacggacgccagctccagtttttctccatgtattcaggctgataaagccattcgccggactgcttgaacacatttcccgtcagctgatagccttcttcatcacacatataaattctgaagcagcagtcggtcaggttttccgccagttttttaataaactcatcgtccgcctgatgggttttctttagctcggaaactgcctgattgacccgcttataaaaattctcagagtgttcatataccgtttccagcttctttttttctctcgtaataaattgctgaaactccgttttcaagcgtgcttttaacaggctccggtctataaaatccccgctcggcgcctgcagataatagccttgaaaaaatcggcctccgtttctccatgcgtactggagctggaaatcagcttctatatcttcatacagcagcgcggcgccgatttttctcgccagcaatgaaatgctgtacagcacatgctcatatgatggtgacggctgagataccttcagcgcctgcaaatctattttcagaaggtccggtgaaaggagcgcgattctgtccaggttgctgctctccttacctatattgtccaccgcgattttaatgccgtatgtacgatagtaggcaagcatatggtacagctgttcaatgtcgccttcgaaattgtgctcggtgatctcaagcacaatacggttcaattcaatgccctgctcttcgtattctttcaaaagctcaagaaagctttcgccgtggtcaagcatcaatacattcgcatcctgattgataaaaatcaacagatcacggtcagcttctttaaaccgctccagcgcctgcctgatgactctgtcatcgacctcaagcttatattcttccggaatgccggaatctaagaaaaacggcccgaggctctcaatctccgcatctgccaaaatccgcccaagcacttcgtagcctacgactctttgttcctcagcgttaaaaatcgcttggtaatacggaatgacatcatcaatattcgtcagtatatcaagtgggtccaacatgttatcacctgcttctctatctttgtctgattatacacaattatatcagcaccacaaatgtttagattaggggaaaaggaggcagtatggccgcagcttaaaataaaagggggacatttttaagatcactcttcagaccggttaattaaggacgttattcatttgtttcacaatcacaaataaaaggataaatataagagcattataaccggcagctgtccaaaaataatggctccaatcagtgctgttaaatatccaatcatcatcatgtttcaactgaaagaaagttccttttttatctaaagtgccaaatgtaagagttgttaacccgccaacactctcggaaacgtcaactccatacattgaaccggcagtatcagtatgatttattggcatatacgtgtaatcagataaaattgtttccgccagcttggctggcagagacacatataatacagccgatgtatcgcctccgagcccactcaaatactccctggctttaataaatttcgtttcatcaggaaaatcgatgtgatatagcttttcaaatctgattatttcatcagatgtaagattggtattttgataatactccggagtaaaagcacaaataataaagtaccaaatattaaagatgataacgaaactgcttacaaatagtacaacgaaccattttaataatttcttcaattaatcgccccttaatctttcaaaattatatcataattttgaatagaaaataaaacaagcgaacggcggctttaacgttcgcttgttttgcaaaataatcaatatatgaaaaattaaaacggataaggattcagccattgacccccgtccattgtgatacaatccccgtttatataggacgcttcatcagatagcaaaaacgctgccaacgcggcgatttcttccggtgtgcccagccggccgagcggcacactgttcatagtgcgggacaccgctttttccgattcaaacagcttctccgcaccgcctgtccgttcaatcgggccgggggctatcgcgtttgtgcggatgccgtatttgctcccccattcaacggccagcgttcttgtcagtgacaatacccccgctttggctgcagcggaatgaacgacacccgctcccgctccccatgcgtatgtagcggccatatttaagatgacgcccttctgctcctgctcgatccaatgccttgccgctgcttggctgcagaaaaatgtgccgtttaaaacaatctcaataacagctttccatccattgggcgtcagcttctctgccgggcaaataaagttgccggccgcattgttaatcagcgcatcgagccggccaaagacttttttcgcttctgtcatcatgtctgaagcggcggaatcagaacggacatccatttgaaaacaggcgacctgcccctcaaaggtctcaatttctttttttgtttcctcaagtgcttcatggttcctccctgtcaccatgacgtgccatcctaattcagcctgttttttcgccattgcttttcccatgccgcttgatccgcctgtaatgattaccgctttcttatccataacaaacccaccccttattattgaatgaataatcattcataattttatcacagatgtctttccgcgtcattacatgctgagaagggatttttcagccaagctgatgatataatagaacaactctgacaaaggttggttttacatatggagaaaatgaccagaagaacatttttaaaaagaggattcggcattttgggtacagctctcgcaatggcttgcggaggttacggctatgcccggtatattgaaccgcgcatgattgagatcacccggcatacaatcaccagccgcctgatcccccgcggttttgacaattttaaaatcgttcaattcagcgatacgcatctcagtgatgtgtttacatccggtgacttgaataaagcagcggaaaagatcaatcagctgaaacccgatctgctcatctttacgggagatttaattgataagccgcatttatttaatgatcaccagcatgcactcgccgtgctgcaaaatcttgaagctcccttcggcaaactttgtgtttacggaaaccatgaccacggaggctacggtacgaacacgtacaaggctctgatggaagcggctgattttcaagtgcttcgaaacggctaccgtcaggtgcagctgacagatggaagccggattgaattcgcgtttttggatgatgtaatgctcggaaaacccgattatgaaggcaccctgtcacgcctttccgaagatgcgttttccattttaatcgtccacgagcctgatgccgctctcaagataggcggatatcccgtaaacctccagctgtcgggacacactcacggcggccaggtccagctcccgtttttcggccctcttattacgcctccttacggaaaaacgtataccgacggcatgtatacgctgcatgacacaggcgtttacgtcaatcgcgggctcggtacgacaagactgccgtatcgatttttagccagaccggaaatcacgctgttcacattgaaaaccgagcaaaaataagacttttatcctgatgcacagacaccccctccgtaatatgtatatggaaaagagcaaaaaggagggtgatgaaactgctgacatatcaagtgaaacaaggagaaaccatctcaagcattgcgcaagacttcagaataagcactgctgctctccttcaggcaaatccctcaatccaatcggtcatatacgcgggacagcatattatcataccgaatcttcccgacccatccaccattccctactccatcatcgtgtatatcggagcgaagaaactggagttataccgccttggcaggctcatccgtacgtatcccatcgcagtcggaaaaatattgacgaccacgccgaccggagaattttacatcgtgaaccgccagcctaagcccggcggcccgttcggcgcttattggctcagcctctctaaaattcattacggcattcacggaacaaataatccttcctccatcggcaaagcggtatcaaaaggatgcatccggatgtataatcaggacgtcactgaacttgccgctgccgttcctaatggaacaagggtgactattataagatagaaagatcttatttgttaatggaacgagctgatgataatatattacagtgggacctttagggtaaggagcgtgtttatggatatatttaaaaatcgcaattttgtccgtctctttttcgcagcactcgcttctcaaatgggaacgactgtaggtaatatggctttcgctttttacttgctggaccatttttcaaaccagccggcatacacgactttggctgagctgatgtattcactgccgacagttttcgtatttctgattgtcggtgtcgcagctgaccggcttgataggaaaaaggtcgcagagaattgtgactggatcagagccggactgacgatcgtattgtttgccgcattatacaccgggagcatccctctcgtgttctgtattttgttcatcagaagcgccgtgaccaagttctttttcccggcggaagccagccttgtacaagctattctgcctaaggagcattacgcgaaagcggcgggacttaaccagatcctgttcagcatcttcatggtattcggtgtcggtataggcgcgtttatgtataaaacgatcggtattcacggagccattatccttgattttgtcagctttattgtatcaggctttctgatccgcgcgtgccgcattccgaaagaagcccgtcagccgaacggcccttttaaatggggagattcgtttctgaaagactcggtcgctgattttaaggaagggatcgtatatattgttaaaaacaaattgcttgcttcccttattttcggcttttttatctttggttttgtcaacggcggctttgccgtactgccgatgtttacgatgaaatacggactggcgcctgatcattacgaatcacatacttccatcttcaccgtcgcactcggcttcggcctgcttgcaggaagtgtgatcggaacgatgatcgcaaaaaaagtcaaaccgcatcatttgatgtcgattcctattttggcagccggactgctcatttttatcctcggctatacggataagctgtggatttattatgcggcggctttcgtcctcggcatgtgcatcggccctgtcaatatcgccatcggcggctggatgccgaaaatcgttcatccgaaaataatgggccgggtcagcggctggcaggatccttttatgatgtttgcccaatcgattacactcggactggtcgccctgttatttccgaaattcgttaccaatattgattacctttattacggcatgggaatcgtgattttagcggtatttgtgttctattttatcgctcttccgaaatacagcgccgaggcagcagagatcgatgtgcagcaatcattaaaggctgattctgaaaaacatgcgaaacctgtctaataaaggaaaaagatgcgcccttttcatcagaaaaaggcgtatttttataatcaatatttgcatttcaacgctaaaaaagtataatctatatatgaacttgatcaatgcaaaggagagaaataatggacgaccacgcttattcgaaagagctgcagccaaccatcgagaatctttcaaaagctgtttatactgtgaaccgccatgcaaaaaccgcccccaaccctaaatacctttatctgctgaaaaaacgggcattacaaaagcttgtgaaagaaggcaaagggaaaaaaatagggcttcacttttcaaataatcccaggtttagccaacagcagtcagacgtacttatctctatcggagactactattttcacatgcctccaacaaaagaagacttccagcatcttccgcatttaggtacgttaaatcagtcgtaccgcaatcctaaagcacaaatgtctttgacaaaagcgaaaaacgtattgcaaaaatatgtgggcttaaaggaaaaaccgcttgccgccaacaggcagcagcccgcttatcataaacccgtatttaaaaaacttggtgagagttatttttaattccgccgcaaaaaagccgatgcgtcatgcatcggcttttttctattcaatcacgtacgtatccacttttttaatgagctcgctgatttcaggcttgctgatctgttcatccgctccgacgacttcgccccggtggcgcaggtcgtccgtaatcagggacgagaaaatcataatcggcacatcagagctttgcgggttatccttaaggagcttcgtcaaacgatgcccgtccattttcggcatctcaatgtcactgataatcatgtcaatatggtctgacaggtttgctccgttatccgtcagttccacgacgtaatcatacgcttcttttccgttttcaaacgtaacgatttcactgtaccccgcctcagtcagctcatccgtcaaaagacgcatcagaagcggagaatcttcaacgatgatcagttttttacccgcccgtctttcatcaaatccttcctgatggacatgataagtctcaactccggatgccgattcaatatcataaatgatcttttcataatcaggcagaaagatcatcgtgtcttccagtttgatgattcccgttaaatgccgctccatgccctggttcaaggaagtcggcttttcaatcgcctcccaggacaccctgtggatttgtgaaacggaaccgacgtgaaagacgattttccgcttgttgaattccgttacgatatatttatcgtcttttgctccttcggcatcaacgccgaaaaaggtatacagactgatgacgggaagaatttcgcctctcagcttaatcatcccttctacgtctttatgagactgaggcacagatgtgacatctaccggctgaatgatttcccggactttcatcacatttatgccaaatgtattgacgcctacttcaaatttgacgatttctaattcgtttgtgcctgaatccaataaaatatcgtattgttgtaaagacaattcaatccctcgctatccgcattcagtattgtactgtatatatcggctgtaaacggaaaaagtgaatgtattcgatccaactggccatgaactctttataaaaagatgcttttttctgatatcccattgactttttgacatcgagtggtaaaatagtcaaggatttttcaggaagaagggtgtaataaatgggtacagtagtcatattcgaccaagatcaaatgacggtgttagaagatatcagcaaaacggcttacctgcaaatgaaaaaagaggcgaaagagcgtcccgacaagcccgctccatacatcttatggcgggaagacgtcagctttgaatacgggtattaatgacattcgccacatatcacaatagatagatcatgatacaatgaagacaatcatttcagctggttgtcttatttttttctgaaagaaggtatgttttcacatatcggacatatactcgggatagttcaataaaaagatgacaaatgctcagctagtggtaaaataggagaaactcaatatatagtataaggtgatgaattatggaacatttgcttaatccgaatgtaaaagaaattgaaatttcaggaattcgcaaattctcaaatcttgtagctcagcacgacaatgtcatttcgcttacgatcggccagccggatttcttcacgccgcaccatgtcaaagcggctgccaaaaaggcaatcgacgagaacgcaacggcatatactccgaatgcgggcggccttgagctgagacaggccgtacagctttatatgaagaaaaaagctgatttgaattatgaagctgaaactgaaatcatcgtcacaaccggggcaagccaagcgattgacgcgtctttgcggacgattttatctccgggcgatgaagttattctccccggaccgatatatccgggctacgaaccgatcatccgcatgtcgggcgccgttccggtccatgtggatacgacgacacacggatttaagctgacggcgcggctcattgaagaatcgctgacaccaaaaacaaaatgcgtcattcttccttatccgtcaaacccgaccggagtgacattgtctgaggaagagctgcaaaacatcgcagccgtcctgaagggcagaaatgtttttgtcctgtctgatgagatttacagcgaattaacctatgacagaccgcattattcgatcgcgtcttatttgagagaccagacgatcgtcatcaacggcctgtcaaaatcacacagcatgacgggctggagaatcggtttcattttcgcaccgaaagaaattgccaagcacatcttaaaagttcaccaatacagtgtgacatgcgcgtcttcaatctctcagaaagcggctcttgaagcggtgacaaacggtgttgatgatgcgcttattatgagagaacagtataaaaagcggcttgactatgtatatgaccgtcttgtttcaatggggcttgacgtcgtaaagccgtcaggcgcattttatatcttcccttccattaagtcattcggaatgtcatcgtttgattttagtatggctcttttagaggatgcaggtgtggctcttgtgcctggcagctcgttttcaaagttgggtgaagggtatgtgaggctgtcattcgcatattcactggatacattgagagaaggcttggaccggctggaagcatttattttaaaaacgagagaatccatgcagactatttaaacaacggcataacgccgttgttttttattgtttcgggaatgtaatatgaaaggccgtgcctctgtccggtttgctgtctacttggatagctccctggtggtttttaataaggttgaatgtgaccatcagccccaggccggttcctttttctttcgttgtcaaaaacggttcgcctattcgtttcagcacgttttccggtatcccgtcaccctcgtctttcaccgtcacattaacggaatactcatcttctgtcatgatgatgtgaaccgttcccccatccggcatcgactcaacggcatttttaatcagattgataaacacctgtttcagctgattttgatcaccgttaatatacatgctgtcatgttcgtaatccgttttgataaaaatccctttaagatttgcctgcgtctctaaaagagcggtcacttcacttataattttctttaagtttacacgctctttcacggcgttttgctgaggtttggcaagcattaaaagctcacttaaaattaattcgattctgctcagttcagaaaacacaatttcaaagtaatgttcgttttcccccatcgtcggcttcatgagctgtaaaaatcctttgatcgccgtcagcggattgcggatttcgtgagcgattcccgccgccagctgccctgcgatagacagcttctccgacttcagcattaattcctccgtctgcttccgctcagaaatgtcacgcagaatgacctgcacggccgtttctccgaaaaacgtcgtcggaatgcagaccatttccgtgtagatcagccggtttttaaaggtaaaccacgattgcttaataatttctgactcggtctttcggttgataatattttggatccgctgtttcacgccgtcatgatcacagggatgaagctgatcatagacgtttttcccgattaaatcttcatatgtttcagcctcaaacagcgaaatgcccgactcattcatgaatacccatttatcattgtgaatcacggcgatcgtatcaattgaattctgaatgaggagctgataacgctctctgcttttttgcagaatcgtttggaattttttccgtgaagaaatatcaatcagaagcagcaattccgcccgctgatttttatatgtcgtcggtgccgcctttacttctaaatgaacgggcgtgccgtcgagtcttctccacgtctgttcgatcattccgacttccattcctttttgcatccgcacaattcggtttttcacaatgtcgtgatactcttcttcaataaactcataagagcgcctgccgattacctcgtctttgctttcggctcccagcatggcaagcatcgcgttgttggcgtaggcgattgtgccgttgatgctgacatataaaggattcggcagcatttcgacaagacgctcgaattcgccgtttccagccgcatcttccgactgttgttctgccttttgcttcttttgttcatacatataaggccggcggggcgtcttctcctcaagcaccttgattttgaggatgatttcccgatccgtcccctccatttgcggtgtgacaatttccacacccgcttcaagccatacgatggtatgatcttttttaataagacgaaaggtgcaaggcatcaaatgatgctcattatagaagtaactttcaaccaaaaattgatcttcttcatgcaggaacgttttgagaaatgacccgatcatctcttcctgagaataactgaagtacgatttgcagtttgcagaaatatacataatacgcccgttagacgtcaaaacggcatgaagatcggttttcgattgaaactgtttgacatgctgagtatcctgttccacagaatccctcctttgcattatactcgcactgcaggctggacacggactgatataaaaagaaattccactagattgattcgctaaaaaatgagcattctccttctattcttattgtgaacgtcaattttcctgaatgaaagaaagggcgcacgagatgttcggccgccctttcatgtgttattttttattgtatttcttttcaagctctttgtaagcgtcaactgctcccttggcaatgtttttgcttacatgatctttatcatttcgaacagacggaacgacgacgctgaatgccactcttggatgttctgacggataatagccgacaaaggtcaggttatacgtgtacttcccccaccagtttttgttcgtgccgtaatagtgcgtctccgcggttcccgtttttccggaaacatcagcgccggaaccttggaatgttgaataagccgttccttgaggtgagcttgtgaccaatttcattcctttatgaacctgatcaaaatcgctcggactgttatttactttgttcaaaattttaatatctcgctgttcaatcgcttttccaatcttatttttgctgtccggttcatgaatgcttgtgacgatccgcggctggacgcgatacccgccgtttgcgatggctgaaatatattgagccatttgaagcggcgtatatgtatcaaattgtccgatcgcaaagtcaagcagcaatcccccgaccatttgcggatttgactgcatgcccgctgattcctgcggaagatcaatcccggtcttcacacccaggccgaattgggcgtagtagttgcgcattttcttaatatcgtctaatccggcaggcagcgtgccgtgcgggacataggtaatgcccgcgatattcatggccacatgaaacatatacacgtttgaacttctttgcagcgcggtcagctcagtaatggctcccatttgtgtccacgattgttttctcgttttgcctttaaatacaagcggtgcatcgacaaacgttttataatgcgggaggccgctttggtaacccgcgagaacagtcgctcctttaacagaagagcccatctcatattgggtcgtaaatgctccgatcgcaaaatcctgtgttttatttgtttcgagatcgatgcgtttccccgccattgagagaatatccccgttgttcgggtccatcatgacggcaaatcctctgtcaaccataaagttgcctgcggcgcggcttcttctcagctctttttcaatgactttttcgactttcgactgtaattccatatcgagcgagagctgaagatcgtagcctctgctgccttcatcgacgggcttttggctgacgacctcacctttgctgttttccacatactctactttttctttatgcgcgtttaaatagtcttcatattgatattcgatgtagctttttcccactcggtcattcagtgaatagcctcttgtgacatagtaatctttccgttcgcccaacaatccctgttccggtgtcgtcacaccgccgaacagagagtaaagcgttttgtcatacggatatttacgcgtccagtcattgatcacgtcaatgccggggagctctttcaggtgctcggatacgacggaaacttcttcatatgtcaggtcgctttttggtttttgcttgttgttttcatgctcgtcaagcagtgaaccgctgtttccgtttccgttcagcttattcgggtccattgatttgacgacttgcggctgataggcgttgccgcttgaaaaacgcgtataaatcgccgcgatttccagctcttttttattttgtttgatcgcatcaatctcctgcttcgggacgcgttcaatctggcgtttgtatacttcttgggatttcaggctgttttctgaatccttcataagcttttccgccttcttcggatgtgcggcaagccagtaatcaatgatatttcgatccttcataaattcagtatcaatatgaatcagtgcggcgagattttttgccgttttcaatttgtcctttgccgaggtttttgaggtagaaacgtatacaatttcaggcacagcctggttatcaaccgccactctgttccgcttgtcatacatctttccccgcggtgtcggataataggcggtttttgcatttgccttctccgcatcctggcggtgtttatccccttcgacaatctggacgatgccgagtttaaaaatcagtgccgtaaagagaaggaaaacaactaaaaaatagagattcattctcagcgctctgtaacgtttcgtttttttctttggttcacgcgcaacttcagccactttctgttacacctctcaaatcattgaatatatttacataaacagattttaattgtaacatttttgtaaaagttgttacagcgaaaacgggtaaaaaaaactgtcaagatcaaattatcttaaaatatatctaacacttcaaataatttgaagagatgtaacggattttaaaaaataaatacagatcgtttttcccggtatagagccatttttctgcgctcaattacaattatgacaaacgtttgttgtcaaaggaaatggctgcctgcattatgacaaaaaagctgtgataagatttttcatgtagaaaaaaacaacttctctgggaggctataaacttatgaaaaaagcatttctcttatctgccgccgcggcagtcagtttgattacattcggaggcattcagcaggcatctgccaaagagctgtcatgccagcacgtcgttaccgtgaaaaaaggaaacaccgtacagcatctgactcttcaagaggctattgaaaaactacatatgaaaacgagcgtgaaaaagctgaacgttaaaaatgagaaagaactgaaacagcagctgcaaaaacacgcaaagaattctgatatgacagttaaagacgttcaaaaagaaacaccggcaaaaacggcaccggcagctgccgaaaaaccgaaagccgatcaaaaccagcaaaaccaggctgctgacaatgcaaagcagacaaataacacaaacaacagcagcgagaaaactccttcttctgtcagtgcgtacgaaaagaaagtcgttgaattgacaaatgcagagagacaaaagcaaggcttaaaacctctgcagattgatgataaactaagcaaatcagctcacgcaaaatcacaagatatgaaagacaaaaactatttcgatcaccaaagccctacttacggctcacctttcgatatgatgaaatctttcggaatcacttataaaaccgccggtgaaaatatcgccaaaggccagccgactcctgaagccgttgtcaaagcttggatgaacagtgaaggccacagaaagaacatcatgaatcctgagttcactcaaatcggtgtcggttacgtagaatcaggaaacatctggacacagcaattcatcggaaaataatataaaaaagattgccccggcgggcaatcttttttatttcacccaaagcttataaatactttgagttccgctgttttcttcaccttgcgcggaaagcttgtcgtataatgatttggcgagcgccaatccgggcatctcttctcccatcagttccgcttcttcaagggcgattcccatgtctttaataaagtgtttcacgtagaatcctggtgcaaaatcgcctttcagcatacggggagcgaggttggacaatgaccagcttccggcagctccggttgtaatgcttttcagcacttgttccgggttcagaccggatttttcagcgtaagccatcgcttcagccactccgaccattcccgctgcaatcgcgatctgattgcacattttcgtatgctggccgctgccggccggcccttgatactgaatgttttcccccataacggagaaaagcggcaggcatgcttcaaacgcttctttttctcctccggccataatggcaagcgttccgttcctggcgccgatgtctccgccggaaacgggtgcatccaaggcgtgaatggacttttctttggcctgctccgcaatctttttcgccagagacggttttgatgtcgtcatatcaatgacaaacgtcccttcttttgcgtgccggagaatgccgttttcgccgagatagatttcctcgacatcactcggatagccgaccatggtaataatgatgtctgctttctctgaaaggtctttgaccgtctcctgccagaccgctcccttattcagaatctcttccgctttttgtttcgtccgcgtgtagactaaaacaggatagcccgcttctaaaatgtgcgatgccatactgtttcccatgacgcctaaaccgataaatccgaccgttttgttcactgcgctttcctcccatgatgcgattcataatatcattctttcatgtctatattaccatattataggctgatagagaccgcgttacaaggtgaatttagaaatcgcgctgatcagatcttcgctcgcgctctttaacatgtcagtcgattgcttcactttttcaagcgtaacgagctgttcatcagtagaagcattcacttcttccgcggctgccgcagattcttgagaaatggcggagatgctttgaattgcttcttgaattccggcttgttcttcactcattttttgaatgtcattgtaaatatgatctataccttgaacgagagactgcatttccgtcgtaatcagattgaggacctcacccgtttcatgaatggcgctgttttgttcatcattcattctgcttgcctcaatcatcgcgtgtgacgcttcttttgtctcagattgaatcagacggaccgtctcactgatatggccggaagaaagagctgattgttcagcaagcttgcggacttcttcagcgacgacggcaaagccccggccgctttctcccgctcttgcggcttcaatgctcgcattcagcgccaagaggttcgtctggtctgaaatggcggatattgccgtcacgacttcttctatgtttttcgtttgttcttccaggtcattcagcattgcctctacttttttcgtttctgaattggcttcgtttgacttcatcagcagctgcccgagcgcgtccaatcctttgtagctggcatcctctgaagattttgagagttgttttatgctgcccgcgcgatctgcgattccttttattttgaccgagagattttctgatttttcattgatcgtctcaacctctgacgcttgctctgtcgctccggcggcgacttcctctatcgcttttgcgatttgtccgctcgtttcatttgtttcttgtgaaatgacggttagctggtcagatgtatcagacacattttctgaggaggccttaacctgttcgaccatctctttcatattttcaaccatttggttaaagtcttttgttaactcgcctacttcatcttttgatttcgtctgggcgcggacggttaaatctccagctgagactgaatttgttttggcgatcagctgctgaatcggcccggttatcgtttttgctaggaaatagctgagtccgatcgtaatcacaagggcgatcagtgacataaaaatgctcaccgtgttcattttatcggctactcccatcagctgatctttttcaaactgcgttccgactttccaccctgtttcttttaccgtttggtagacgaccatgttcccctgcagctctttgacgccttctttatccgtggtgatgtcttttaacgtctgatcttccgaaatattttttccctgtttttccggatgcgccagaagagagccgttttcatccgccaaaaacgcaaatcctttatacggtaccttttgctcgttgaccatgctctgaatggaggacagcttcagatctaagctcgccactccgacgacggttccgctgttttgaatggcttttgacgccgtcacgatcatgtctcccgtcactgcatctttataagggtcagtccagacaaccttatcgggtttttcagccgccatcttataccacgttctatttgtcggatcatagtctttggcaaaatcggcctttggatatgtaaacatttgtttgtttgcggttccgacgtacgcaagcgcgacatatttgtcattctgtccgatctgttttaactcatcgttaaaaagccgcgcggtttctttgttcccatctgatagaaaagaccgggacaattcaccgcctgctaatctcaataatacggtctcatcatttttcagctgaagctcaatgttctgaccgagtgaattggtgacattctctgtcgtacgttttgcttcctccgtcatcatcggctttaatgtcaaatatgaagaaaccgttaaaaaaacaaccgttacgataagcattgccgatacaaacacagcaattttgatatgcatttttttaaacataaccatcccctcctgagagttatatcggtctttcggccatgaaaatgaataaaccttgaaataaatatcaaaaatttccgccatttggcgcagcaaaaaaagagccgtcatgccgacagctccgccttacgtaaaatattcgattttcgctttcggaaaataggtttcgatataagattccagtgtttcccttaaagcatgctcttcgtctttttggtatatatacttgccgattccgtagcgtccccatttgtatctgcgcttttcttcatcaagctcaagctttgttttcggatagttcttctcaatcacccgtttggctggttttgtaaaacggtgctggatcagttcaaatgtgatgtcatgccgaacgtcttcatcaagcgccgcatccagtttctcaaacagttccttatagccttcctcccagccatcgtgaatataaatcggcgccacgatgaaaccgagcggatagcccgctttagcgactttcacggcggcttctatccgtttgtcgagcggagaagttcccggttcaaagtttttaatgacataatccgcattgatgctgaatctgaacctagtctttccgttatgttttgcatcaagcaaatgatcgacgtggtgaaatttagtcacgaatctgagctgtcccaattcgctttgtccgaaatgttcaatggctctttttaatgtatgtgtcagatgatcgattcctacgatatcagacgtacaagaggcttcaaatcttgtaaattccggcgcccgttctttcatatactcatcagcctgatccagaatctcttccacattgacatatgtccggatgtagggctttgaccccatcgtcgtctgcaggtagcaatagtggcaatgccccatacagcccgtcgcaaatggaatggcatattcggcggacggctttgaagaatcgaatttcagtgttttccggacgccgattaccaatgttgatttcgcgttccggtattgctgcaagtgatttttccctggaatattccggacttgattatgcgatgtcgtttctctgatctcaagccccatgttttcaaacttattcttcagctcttgtcctaacgggtattcgagcgctctcggttcaatataaacaagctggggcacaaacggcttcagcatagacagacactccctttacatattctcatgttgttactttccgtttaaaagagagtgaatatgcgttgtaaacatttcctttgatcaatgataccggtcttcttcaaaaagctcgctgtaaagcgcttccgcttcctcatatgtcgaaaagaccgcgtcatcttcggccagcggatgataggtttcgtataaaaacagagacaactctccctcatgatacgggtgatggacgatctccgcctctttaatatgggcaacattggcggcatgcggattgcggtaaatcacatagaccgtatcccccgctgcaaatgattttgtcatgataatccctcctgttgaaagttattgttccccccttttttccgaatatgacaaaaaccagacggcttacaccgtctggcttttgtattacttattgaatgtttctttaacgaatgcgacaacctcttctgtcgtgctcatagacaagattgtttctttgaatgattcagcttcttttttagaaagcttgctgatctgcgttcttgccggaaggatggatgtagcgctcatcgagaactcatctaagcctaagccgagaagaatcggaatcgcaatttcgtctcccgccatttctccgcacatgccgacccatttgccctctttgtgagcggcttcaataacaagggtgatcagacggagaatcgccggattgtatggctgatacagataagctacgcgctcgttcatgcggtcagcagccatcgtgtattggatcaagtcatttgttccgatactgaagaagtcaacttctgcggcaaactgatctgcgataacggctgtagacggaatctctaccatcataccgacttcaatatcgtcagaaaccgctacgccggcttcgacgagtttttctttttcttcgagaagaatcgctttcgcctgtttaaactcgtttactgtcgcaatcatcgggaacatgatttttaagtttccgtatgtacttgcacgaagcagcgcacgaagctgagttctgaagatttcttgctcttcaaggcaaaggcggatggctctgtagcctaagaacgggttcatttctttaggtagctgcaggtaaggaagctctttgtcgccgccgatatccaatgtccgcacgacaactgattttccttccatacgctcaagaaccgttttataagcgtcaaactgctcgtcttccgtcggaagctggtcgcgtcccatgtaaaggaattccgtacggtaaagccctacagcttctcctccgttttcaagaacgccttttacatcgtccggtgtgccgatatttgcggcaagctctacatgatggccgtctttagaaacagtcggttcattgacgagcttcgcccactcagctttttgcgccaggtaagcactgtgcttttcttcatatttctttaacgtttcactggaaggatcgatgatcacatcaccatcgatgccgtctacgattaccgtaacaccgttttcaattgtccctgtagccgcttttgtgccgacgacagccggaatttcaagcgaacgggccatgatcgcggagtgtgaagtgcgtccgccgatatcagttgtaaaaccttttacaaactgacggtttaattgcgccgtatcagacggtgtcaaatcttcagccacgataacaacctcttctgagatcatgctcgggttcggaatttccacgcccagcaggtgccctgtcacacgttttgttacgtcacggatatccgccgcacgctctttcatgtattcgttatccattgattcaaacatagtaacgaacatggaagctgtttctttcaaagcgaattcagcattgactgaatctgtgctgattttctcctttaccgggttcaacagctcaggatcactcagaactaaaaggtgcgcggagaaaatgtcagctttgtcttgtcccagttcttttaaagcatgctctttaattttttcaagctcttctttagaacgtacaatcgcttcatcaaaacggcttacttcagccgcagcatcagcaatgtttttcttttcaaccgttaagtccggctcttcaagccggtatgctttcgcaatcgcaattccggctgaagcgcctattccttttaattcttgcattactcgccgagtccttcgcttttcattgtttcttctaaagcgttaagagcatcgttttcgtcagcgcctgaagcggaaattgtgatttcagcgcctttagcaatacctagagacataacgcccatgattgacttaaggtttactgttttgccgttatattctaagtttacgtcagcatcgtatttgcttgcagtctgtacaagaactgtcgcaggacgagcgtggattccggaatctgctgttactttaaatgttttttgtgccatgattatcattctcctttaaattaaagctattttactacacaatattatatcatacagccgtacttgtcatctgacaagcacggcgtatttatatgcttattttccgattttcacaatatctttttgttcccgttttacggtaccttcggccgaaagggaaatcgcttcaccctcggcaagatttgtaaagacaatcggtgtcattaatgaaggaacatgaggtttaaccgcttcaagatcaacttcaagcagcttttgtcccggttcaacccggtcaccctcagaaacaaaagaagtgaatccttcgcctttcaggctgactgtgtcgattccgaaatgaatcaggatctctcttccgccgtcagactgaaggccgatcgcatgttttgtcgggaaaacattcagcacttttccgcggacaggcgatacgacgattccttcttcaggaagaatcgcaaaaccgtcacccatcatttttcctgagaacacctggtcaggcacatcggtaatcggatggatttcgccggtgatcggagaagcgaacacttcttcaccctgctcgtttcggagcggatctgcgataacctcttcaacctgctggctgacttcttcttgcgcggatactttcggttcagggcgcggcgtgcgtccggcgataatatcctgcatctgtgtttttaaaccgtcagaacgcgggccgaaaatggcctgaatgttgtttccgacttcaagaacgcctgaggcgccaagctgtttcaaacgagtcttatccactttcttctggtcgttgaccgtaacgcggagtctcgtgatacaagcgtcaaggtgcttaatgttttcctgatcacccattgcctgcaggatttcataaggaaggtcgccggcttcgcctgaggcgcccgcaccttcatccgcagcctcttcttcacggcccggcgttttcagattgaactttctgatagcaaaccggaaaccgaagtagtaaatgacggctaatcctaagccgaccggaatgacaagccaccaagccgtccggttaggcagaattccgaacaggaagtagtcaatcagaccgcctgagaaggtcataccgatttttacatgcagcagctgcataaccataaaggaaagtcccgcgaatacgcagtgaatcgcaaacaggataggagccacaaacaagaatgagaattcaagcggctcggtaattcccgttaagaaacttgtcagagcggcagaacccatgattccggctacaagttttttcttttcaggcttcgcttcatgatagattgcaagcgctgccgccggaagaccgaacatcataaacggatatttccccgtcataaatgttcccgccgtcagctgtacgccgtctttgatctgagccataaaaatccgctgatctccgcggatgatgtctccggccgcatctttatagctgaaaaattcataccagaacggcgagtagaaaatgtgatgaagaccgaacggaatcaatgaccgctcaatcatcccgaaaataaaggccgccaaggttggattcgcttccacaagacccgtggagaaggaattcagaccgtgctggatcggaggccagatcactaacataataagaccgagaattaatgcggaaatcgatgtgataatcgggacgaaccgcttacccgcaaagaatcccaggtactgcggaagttcaattttataaaacttgttaaacaataacgcggccagaaccccgacgataataccgccgaacacgcccgtcgccaaagtgggtatccccagcatgttaatataggccggatggttttccgcaaaaaactttgcccgttcaattttgtcagacggaatactgccgtttgccataagcacggcgctcatggatacgttcatgaccaagtatccgataatagccgcgattccggcaacaccgtctccgttggcaagaccgatcgcaacccctactgcaaaaagaagcggcaggttgtcaaatacgatttggccggcgctttccatgacattcgccacaagctgaacgttatcattgcttaagaagtgcatgacttgaatcatatctttgttctgcatggcattccctaacgcaagcaagatccccgcagccggtaaaatcgcaaccggaagcataagagcacggccgattttctggagaacgccgaataatgctttaaacataaaagatgtacctcctctgttagctagtgtgaccttacagcgaaaattcatgacaacgaattcactggcgcaagtcttcagtttaaccgtttacatttgcccttttacacaacaaaaaaggcatgagtaaaaagggtgtgcaaaataacgggaccgttcttcccgttttttaccctcaatcactcatgcctgatcgaatcagtgacacgtttttaaggtttcaactgaaattatgaaattttattggttaatcggtacaaatgaagcgtgagataaaccgcttccgcctcatgaactggctttttcagtatttgctgcaagatttttatcagtttccaagcagtattgtagcatagcgggtattcatttttcaataataacattaacttttctggttcttttgtctgctcttcccgattaatcctgtctatggtaaatctgatatgccggatcagccgcaaatagtggacgctttctttattcactttcatctggaaagattcctcaatcacctgaacgagccgggacatcagctgtgaatgctgattgacctctgaaaggggccgattcgtcagggcggagtggatatgcagagcgataaagccgatctccccttccggaaggcagattcccgtcttttcattaatcatgccgacgacttcacgggcaatttggaattcttccggataaagcgtttcggtttccatgagaaacgggtttttaatgtcaaaaccctgctgcagccgctttaccgcaaatgcgatatggtcagtcagcgcaatatggatatgctcatttaacggttggcttgtccgcttcttgatatgataaatgacgtcattggagatgtcgacaagtgtctcgtccacataaccgaggagctttttaaattgtttttgttctttttcatcctttaagatgaacatcttgtcataccctttatcttcaatgacatccgcttgtttttttccaaagccgatcccttttccgattaagacgacctcactgtatctatcatgtgttgcgatgagcacattgttatttaataccttttcaactgtaaaggaccccttcatgatcctcagctcctttgtcattcaatacctcatatcgtacaaaacgaacggaaagcgcgtcaattctttttttagacggttgatcgttcaataaggcggtaatcaagaactttccttgccggaggcccgccgctgatcctgttctcaagcatgtgaaaagcctgctttcccatttcttttgtttgtatatctattgtggaaatacctaacatcttgctgatatcatgattgtcgatgctcaaaatcgcaagctcttccgggatgcgcgtcccgtttgccttggcttcaaggtaaagacctgcggatacttgatcattcgccgcaaacagcgcagtcggtctgtcatcccagctcttccatctatgaaaaagggctttcccgtcaagcagcgtcagcgccttttccacaaccagctcttccctgtaaggctgcccgaccttcttgagcgcttctttgtatgcggcaatgcgtacttgactgttttttcccttttttctggccaggctgatcgctattttccggtgtcccttttctatcagataatccagaccgtgccgaaatgcttcccgatgcggattactgatggaggaaagccctgccgcatcagtgtactggcagagaatgagcggttctttcacggtaagcagatgttcatcaggaattgctttggagcagataatcaggccgtccacttggcgctcctgtaactgtgataaggcaaaacgttctttttgctgctgataatctgtctggtataaagaaagatgcacgcctgacgcttcggcagcctcggcaatacctgcaacaaggtccgcaaaatacggaagattcactgacggaagcacaacgccgatcatatcggaaaaacctttggataaatgtacagcatgaatgttgcgcgaatatccgagcgattgcatcgcttttttcactctttctcttttgtccttacttacataaggatgatcgtttaatactcttgatactgttgtaacggaaaccccggcagcgccggcaatgtctctgatcgtagccattgcgtcccccctttcttttttcccttgatctggaatgcgtttcatacagtaagctagaaacagaaacagcctattcgtttgaaaggagaagaacagcgatggggattctttgcttaatcggtttgtgtctcgccatactcggcggcagttaccttgccatgcggcccctgaatgaaaagcatgacatcaaaccatttcagcattttgatgattttttcatttaaaaggtgataaaaaaggacgctgcgttccagaaccgtccttttttatcacaaagctttctatttcagaatcgttaattctttcgggtactgcgttaatgcttcggcgccgtcttttgtgacgaacacatcgtcttcaatgcgcacgccgccgacatccggcacgtaaatccccggttctatcgtgtataccatgccttctttgaggagtgtgtcgttcgcgctgctcattgatggatattcgtgaaccgaaatcccgagtccgtggccgaggcggtgcgggaaatagtctccgtatccggctttttcaataatgccgcgggcttttaaatcaagatcgccgattctgacgccgggtttgcttaattgaagcgccgcctgttcagctttaagcaccgtttcgtaaatctcttcctgtttcgggctgattgattggtatgcgaatgttctcgtaatgtctgaacagtagccgtcaagaataacgcccagatcaaacagaacgaaatcgccttttttcaaccggtctgcacccggatttccatggggctgtcctgatttttccccgaacagcaccatcgttgaaaatgacatgccctgcacaccttttttcttcagctcaaactcaatctgcgcgagtacttcggtttcactcacaccctctttaagcgccgcgacaccgacttcaactccgtaatccgcgagttttgccgcttccctgagaatgctgatttccttctcatctttcacgagacggaattggttgagcgtttcttctgccgaaacaaatgccgcgccccctgaagcttgtttgagctgttctgagcgggaaagagagatcgaatccttttcaaccgcgatggaatcaagccgcacatttcgttttgtgagctcggctttgatcagctcccacggatcttcgtgatcgccgtagccgataatatcatgctcccacccggcgctgcgggcttgtccggcttccattcccggacaaacgaaaaacggctcctgttcctgaaacaggaacaaccccattaaccgctcatgcggatccgtgtaaaaatcagttaaataaaatacgttttcctttgtatgtataaacgccgcatcatgtccttcttttttcagccaagatgaaacacgttctaatctgttcattttttgcttttcctccttaccaaagtgactctttattcattctatcagttttccggcgtttatgctgtgaacgaacattaaaaaaacagccgcccgtgtgcggctgtcatgtttattttaataatctcagtccgttcagaatgaccagaatcgtgctcccctcatgcccgatcacgccaaacggcagttccatcacctgaagaaagttggcgcagatcaaaaggcagatgaccgagagcgagaaaacaatattctgcttaataatccggttcattttccttgagagtctgcacattttcacaagcttgtgaagatcatttttcataaggactaagtcagccgtttcaagggccacgtccgttcccccgcccatcgcaataccgacgtcagcggttttcagagcgggcgcgtcattaatgccgtcccccaccatggcgattgtgccgtacgtttccttcagcttcttcacttcttttgccttttggtccggcagacaatcggcaacaaccgtcgtcatgcccgcctcttttgcaatggcagccgcagtttcagactgatcgccggtgagcatggctgttttaatgcccagtgattcaagctcagccatcacggctttggcttcaggtcggatttgatcctttaaggcaaagcagcccgcaatccggtcatcttttttaacaaagaccagtgtaaaacctttatcctttaattcttttcccgatgtttgcaaaaaagcatctgccgcatcttcacctgcaaaccccgcttttccgaccatccatttgacaccttctatttcagcctgaacaccgaatccggacgtctcgtcaatcgatagatgtcctgcgggcgcggcgccccggctttcggcaaattcagctatcgcttttgcaagcgggtggcttgattgcttttccatggcatacaccgcctgcatgatctcatcttcactcacatgttccgcagcttgaaatgccgcgactgccggctgtcccttagtgaccgtgccggttttgtcaaatgcgatcatccgtacgcttcccagctgctctaaaaacacacttcctttaaccaataatccgttgcgggccccatttgagataagggaaagcgcagcgggcataatagaagcgacaagtgcgcacggggaggcgaccaccataaacaccatcgccctgtaaaaggtttcactccagctccagcctaaagcgaaatgaggaatgaataaaagcaaagccacggctaacagcacgcctttgacatagacactttcgaaccgctcaataaatgcctgagccggtgacacgctgttttgggctgattccaccagccggatgatttttctgaataaagactgttcatttgttttcgtcacacggaccgttaaggagccgtttccgtttaccgttcctgtaaacacagaatctccggctgttttttccgccggcatcgcttcacccgtaagcgccgattcatcgaggctcgtcacgccagactcaatgatcccgtctgctgctacgcgttcgcccggcttaatgacgatcatgtcaccgatcttaagttcagcagccggcacccgcttttcccgtccgtccgcaagcagtgtcgcttcctccggttccagtttcattaaagatgttaaatcacggctgcttttattcatcgtatatgtttcgagcgcgccgcttaacgaaaaaataaagataagaacagcgccttcagcccaataaccgatcagggcggagccgacagccgcaaaaatcatcagcagttccacatttaacgccttcgtctcaatggtatcctcaattccctctttcgcttttgcaaatcccccgatcaggaaggcaaggatatacaaagtgacggacaggccttttgtttcggtaaaaaaccaggccgcaagaataaggacgccggatacgagcgccgcaatgagttctgcatgctggagccacttttttccggcccgctcttcttgtatgtgctgttgtgaatgggtttgtgtcatcacttgttcattcattatgaattctcctctctaattgagaacgcaaatcatcttcaattccccgataaaagcaaaacagccgcctgacaggcagcattttcacagtgttatcgcagtgttttctttattatagcatgccggcggaagatttcaattataattgttttaatttctttttgataataattatcattagtgtttcttcagctgttcattatatgcaaaaaaggtgcgggaggaattcctcccgcacctttttatttctctgaccattcttttaattgtgaggcggtcatcggaccgacgatctttttttcgatttctcctttttcattcagcagaaatgacgtgggaatcgtcatgacatcgtattccttcataagctcgcctttcgtgtcaagaacaatcgggaaagtgagatggtgctgactgacaaagttttgaacggtatttttgtttcgctcggcattcatcaaatttaccgttacaaggcttacatcatcggactgatgctgttcataatacgtttggaactgaggcagttcttttttgcacggcggacaccacgatgtccaaaaatgcaaaatcgttttctgccctttattcggaatcgatatctcgtctccttcaatcgtcttcatcagaaacacggctggaactgcctgtttttctgatgaggcttttgcttcaggcatccagacggcggcagctatcaaaaggactgcacatacaattaggcggtttttatgcatatgatcttcctttcacgcgtttcggatagcttgcccttccttattgaaatgtatcagccttttcagctttcgatccggggcgctgttcttccgccgcccgtcaaaaacacggagacaccgaggtctttgcagatcgtcgcgtaatgtaaacttgtcagaagaatcatgccggtattcatgccgagtataatgccaagcatttgcaattccggcatagaaccgagcacatacatcatcgaaagccctacaatgctgctccatacgttatgataaaacgccgttttcacgtggccgataccgatcagacaggcctgaagcggcatcacaaacagatgaaaaagaaaaaacggccacaaaagctgcaaataatactgcgcttccggagactgaaaaaacaaatgggtcagcgggcccgcgaactgaaacatgacccagactgccggaatgccgtagccgaatgtaataaaaatcgcttgtctcagccgtttcagcacaatatcatattgggacagcgcatacgcttctgaaatgctgggaatcatgacgaccatcagcgaatgggcgataaatgcgggaaacgaaccgattgtcatcgcaacaccggcaagcatgccgtattgatcaatcgcggctgtcccggctgccccggacgccagcagcgctcctttcactaaaaagggttcaatggcgttcgtcaccgcatgaaatatacgaagtcccgttgtcgggatggatacggccaggaggcgtttccgcacgtccttgccgcgcagatgaatgtgctgatggccggaaagcgccctccgcgccaaaataaactgcgtatacaagtaaacgaacaccacgacatcgcttgcgaccagcacaaataatgaaatgagcacggccatatcaatttcaaaagagtaccattgaaaaaagataaacagacaaagcacttgaatgatttttttcatgacattcgcaaccgcgatttttcccatttgctgcacacccataaaataacctctggcgatggatgtaaaagcgacgactggaatcagcccgatgacaatccctttaataaacgggtgatacgtatcgaatacaggaatgaacggcagcgcgatgcttgcggccgcggttgaaaacgcggtaaaaacggcggtcattctgaaggcatgccggagcatgctttcatgcagcttctgattggattccgcgatgaattttgaaatggagatcggaagctccagactggcgatgacgataattaaaaaaatggtgggcagaatgctcatgtaaagtcccatcccatgctcgccaagctcccgcgccagtatcatattcacgacaaattccagacattccgcgaaaaaggcggcgatggataaaagaatgatccctttcacaaatcgattcatggtgtctctccttgtctctcgttcttccatcatcatatgagacaagttctgaaaatattttcgatttctcaaaattgaaaaaagcatagccgggatatttttgatcccgctatgcttacatcgcaaatacgtgtctgccgatccgttcgataatttttcgggaacggatccagtggtcagatgccgttttcggattgtagaaaaacaacgcgttcgtttctctgcccggatggtcaagcgcctcatttgcggcggcgatggaatccttatccggcttttgattaatgcttccgtttgctaccggttcaaatgcattcctttgatagatcacaccccgaatggtatccgggaagccgtttttttcagtgcggttcagcactacgctggctacggcaaccttccctttataagattcacctttcgcttctgcgtgaacgagacgtgacagaagttgtctgtcagcgcgggaatacgtttttttcggcggctgataagccgtctcttccggttttgccttcttctcttggtgagatgacagctttatcggttggatagaatgcttatgatccgtttttgaaagcttcggaaccgagctttttttatttaaatcagcaaccagtgtgctgggttcttgctttggcttcttcgcaaaagtaaacagagcttctgtatgttcaatttttgatgcaggcataaaacatagaaaaaagacagccaaggcagcaaattttgtcgtcatacgatttcctccttaaatacttcactaccttaacaagagctgtgcacaaattcacggttaaagattttccagtgctcccaatcagcttttatgatggaagaagttcgttaacagccttgttattggcaggaaaacagccgtcattttcacaacattaaccaaatagcagtaaaagtatccatcggagggattttacattttgtttacatctgttacagcaagatgaaatgagaaaccaaaaaacaaaaaaaagactcctcaagtgcgaggagccgtcagcttcttggctgttctaaatactgaaatacaacatctccgccctgctgtgcaataccgcggaaatgcttaaaatcttcctgcttcgataaaactgctcgaaatgcaagaaaatgttctttctgcaccctgaattctttgatttccccggtgcgcatttggttgatacattctgaaatttcctcaggcagcaacgaacacagcctccttttctcggctttttcccgaaaatcaatatatcatctttcccccgccgggacaatgattgagcgggctgatacccatatcgctttacttcttaaagaaaatactgcaaaatattttcaaacaggatttatgataaaggagaggaagctcgtgaaaattgctaaggttggaaacgtcattgaatttaaaaacggattaaccggtattgttgaaaaagtaaatgaaaactccgtcatcgttgatgtaaccatcatggataattatcgtgaccttgaattagattccctcactgtcgtcaatcataagaattataaaatcatcagagactcctattaaaccccccgaacaatccgaaccatttacatatcccgcacaaaagctgccgcccggcagctttttcaaatgaattcagatctcggtcatttctacaaaaaaatcacctgtctcatctttattgtaaagattagtgacggatgtatagtagttggttattttaccgcggaattcaagcccacgctcgggcgccttgatgtcaaatgttttttcatacaaaaggacggcaatatcatgatacgtttcagaggtcaccttcaatataaatgaaatcatgcggccgttttcacccgcactttctttacaatcatacattttcagtcttacaccgtttaactctaacggctccataacgaacactccttctttttacaggacatgctatcatgctgaccattcctttacaattgatccgctccgaatgagaaaaaacagcgcaggcctttacaaacatatgttccctattttataatgaaacagacgagctgccatccagcacccgtcttttcattagaaagcggcgagtggaattccccccggattcgctcgtcttttttatgtaaaaccccctcatttctgaggagaaactatatggtcgattatcaacaagtcatggttctccacgtaccttggcgccttgaatttccccatcctttaatgagagtggtcaatcaattctcatcatgttttttagataaaccagcatccattcaggatagagattcattgcaattatcttcgaattttgctttgaactataaatcattatatatttttaaacactgtattccagactgacgcatcctcttgtccaagactccagctgccaagacctttcagattatatttttgagcgagttttatttttgctctgagtgactgttcattttcaaaccataatgtatatgttcccgaaggcaacagccccttgttatcgtgattgacagtaaaaatagcttttggagattgactctctgtgtcaaaaataattgtcccgttatgcctttttactaatgagtcaacaaggtaaaggggaatggcttgagaggcagattggcctttcatccaacagcggccatagaatggcaatcctaaaactagtttttcaggagagattttttgggtcagagcatattgaatggacttttccacccatcctacacttgcagtaggtccagcaaggtggctttcatcgtaggccataatcataaggtaatctgcatatttagctaaatactcgtaatcatatgatccgtgccagcccttcgtccagccaaaaggatttgccgccactgcaactgatacttctttatgtctaggaatacttttccttaccaatctaacaaaatctgtaaataaattccgatctttttctgtaaggttttctatatcgatattaactccgtccaaatccagttcttctattgcatgagaaatttgtttagctaaaagaactcggttcattaatgaaaatcgccccaaatcctgatcccaatgattgcttagaaaaggaactacttttaattttcttctatgaagagctttaatcacatcgggattagctgaacggagaagtaatgatccatcttttctgatatagaaaaaatcaggagacacaacatttaatactccgttcgtttgatcaacgtgttgaataaaatcccatcctaatccagaatagaaatagctcatttgaaacatctcataaccccttcatccccaaaaatatcaagttccccacaaataaaaaaatgaggattgtcatttcaatttgattcgtttccgaaacctcaaagattatctttctcttatctttataatttgtccaggataaattctatctgaagaaagcttattaagatttataagttgttgtaccgggatattgaaggatttagaaatcgtccataatgtatcgccggattccacatgatatacttcgtatgtcacgggaaattccatataacgaggcgttctttttactttattcgcttgatttcttattttaggtattttccccttcattcatattactctcctttagaaaaatttgttatcaatatttctaaacagtttctctctaatcttaatgatttgtccagcatatatttgatctgatttgaaatgattaagctccatgagttgctgcagggaaacattatacttcctggcaattattgataatgtttcaccgggagtaacatgatggatcacgtatttttctttgagaacatctacataatgaatggttttccctaagtttcttataattcctctgctttttagcacctcaagcattctctcggctctatgcagataggaatcattctttacagcctttttaccgtttatctgaatcttttttctctcgctatcatgattcaaatagtatttaaccttttccaatgtttcttttggggaggaagaaacgatgagatcgcggccaggtttgaatttacctcgaactgctggtgtatccgatgtcaataaaacccccccggaaccaagaatctcataggtgcgttgcgtaagttggctttcacagttttgcaaaccgataacgacttttgctgaactgtagactttatatgcttcagtataatcaaggtatccatggatccaattgcggggaatttctcttcctatatatttactcattttttcccagtttctcccccaaaaatcaatgcgaatacccttccgtataagaggacgaataagcgtttttaaagaggacgaacggaacacttccggatgttcttcaagaaaattagggtaagcattagccaccactgctatatcacaactgtattttgctaatggtttaatctggtgatgtatactttcgtgaaatgcaaagtctaagtgagctgctttaatccccatgctttcataagttttacacagagaaggcgtaaccgtgaaaacaaaatctggtttcacctttttaattaacgggatagtaaagttttgagtgtgcagcgggtcttcagttgcccaataaacgagagggatattcacctttttagtagcgttgcgaatccaggcctgcttttcccttgaatgctctggtgtccatcccatagatactattagatctggtttaaattcgtctatcatttcagtgatattttcccgacttacaggaccggaaatcattacggtatgtcctgcttccctaaacccatttggtaaaccatagagccacatgggatgactctcgaggaaaagaattttcacacattttcgccctctctttcactttttaatgtctactttattggtatgtagaagagaaataatttgtcgcggtaccagtctataaaaaatgttcaagtgcaagataacgtgattgggatatggatgccccacaaaaaaagaaagcaatctacaacatattttcctttgattttgttagcctttctgccaaaatactttcgttaataaattgcttttgtgcttaaaagaaaaagacgtacacatttgtacgtcttacattacctctgcaatagcaatttatttgcataaaagtcataataggcacgcttttatagtgattaacgattatcaatcgtctccggatacatatcatgattcatcatccgatgttcggccattttttcatattttgttcccggtctgccgtagtttgtatacgggtcaatggagattccgcctctaggcgtgaatttgccccatacttcaatgtagcgggggtccattaattcgatcaagtcattcatgatgatgttcatgcagtcctcgtggaagaaaaggcaggtcaaagtcttgtcccataagtacttgctctagacattaatcatgaagtcacaccaatttcacaccttaccaaggggactatttgtaatctctgcacagtgaaattatacctgtgctagcccgccatctacgaacaattcaacacccgtcaagtaactgctttcgtctgaagcaaggaaagatacagcgtttgctacttcttcaggtgtcccaacttttccagctggaacagtatttctggtattttccattgctccttcaagtgcatcaccaaaaagctcatcgtatgcaggtgtaagaatagctcctggactaaccacatttacacggatttcagtaccttttaggtcaagaatccagttgcgaaccagtgctcttaatgctgctttagatgctccatatacactaaacgctgggttgccaattgatccagcagtagagcccgttacaataatagaacctactttgtccgggaatagtgataacgctttttgaacagtaaagatggttcctttaacgttaatgtcgaacgttctatcaacctgctcttcagtaatttcacctaatggaaggaagttgccggtgcctgcattagcaaaaagaatgtccaacttacctttttcctgctttatcatgtcatatagtttgtctaagtcttctagcttagaaatatcaccttgaacaccggttacgttcttgccaatttggttaacagctttatcaagttcgttttgtctacgtcccgtgatataaacatatgcaccttcgtttacaaatttttgtgctgtagcaagaccaatcccacttgttccacccgttacaagcgctattttaccttcaaatttacccatacttaacactcctttagaattgattttattttatgtctagtacctttaagtacttgaagaacaacttacaagatatagtatccttcagtaagcacattatcggaagtacccacttttttgtgatatagtaactaaaaagtaataaatgtggaatggagagctttagacatgaaaaaatttagctgtgggtttgaagtgacaaaggaagttattggcggaaaatggaaaggccttgtattatactttttaatgaatggaccaaagagaacgagtgaattaaagcgcatgatcccaaatataactcagaaaatgctgattcaaacacttagagagcttgaagccagtggacttgtgagcagaaagatgtataatcaagtaccgccgaaggttgaatattcatccactgaacttggagaatctcttaaacctatcttgcaggagctctgtcaatggggaggccattatgcggagcaaaagtatgcagaaggtgaatatgaaattgtacaaccagaacaactaaagttaggattgatgtagctgctgaagtaaatgctaaacaacttcaataccatcacctaacagatgaagaacagtcagaaataaatgagatattcaattttgaaagtgaagttctaataagaagtgtcatggactatattcaggaaaactttgatgaaattcaaaaaagagctgtttcaaatgttaaagagaaggttcagaaacttagccaaaaaataaatgaagatattgataataatatttaatgcctatgatctctagataggcattttttctttcggataaaaaagaaaagacgtacaaattgtacgccttaatctgcttctgtactatcaatttttcactgcataacagtcacagttcaggttgcacctcaggtcacacttttattgagcttagtgctggtcacacttcgctgtgactcggtcacaattccgctgaaaatcagcactgaatgttcggattttactgtgactccacttggtttcacactccgtatcacacaacggaataattaccgattatcaatcgtctccgggtacatatcatgattcatcatccgatgttcggccattttttcatattttgttcccggtctgccgtagtttgtatacgggtcaatcgagattccgcctctaggcgtgaatttgccccatacttcaatgtagcgggggtccattaattcgatcaaatcattcatgatgatgttcatgcagtcctcgtggaaatctccgtggttgcggaagctgaaaagatacagcttcagcgatttgctttccaccattttttcgtccggaatatagctgatgtagatggttgcaaaatccggctgtcccgttttggggcaaagcgacgtaaattccgggcagttgaatttaacgaaataatcacggttcacgtgtttattcggaaatgattccaaaacctccggcgcatattcaaataaatagtttgtcccttgattccccaggagcgtaactccttctaattctgattcttttcttgtcatataaatctccctttctattaaactccccgtttattgccccaaagcaatgtatgcagctgaggcaggactctgacgagattcagatccgaatcggctgaaaccttatcaacgagtgtttcgtattttccgagcagatgtgcgatcaatgcccggtcgtccgtcgtatggacgttatcgtttccgacctgaagataaaacgggatattcggataccgcttgtgcacggttttcgcgaattgcagatcttcatcattaaaaatgacgacctttaagctgaccgcgttaagcctttctgccgcatcaagcgaagacacaatgtgatcgagctttgcaaaatcggttgtcatccccgaacttggcggcttcggtgaaatcgtcaggtcgttaatcattgtgaaccaatcctgatagaccgttccctgcgtttctaaagcggcgcgcaccccgtgctctttcagcagcagaatcagcgcgtcaagctgctttaacagcgccgggtttcctcctgagatggtgacatgggaaaaagcgtctccaccgatttctctcagctcgcggtaaatgtcttccgccgtcatccagcggatatcttttttggcagagccgtcccatgtaaaagcggagtcgcaccagctgcaagagtagtcgcagcccgccgtgcggacgaacatggttttctggccgataaccatgccctccccttgtatcgtcggtccgaaaatttctaataccggaattcctttagccattcctatcaccttttttcgggcggtatacgcaatagcttgtcggggtttccctgacaaaaatctgcacgcagaccggctgattctccagtgtttcgaggtaggactgcaccttatcgtaaatcgttttggccacgacctcggtcgtcggcagtgaatatctgtcatcatcagaaaattcctcatggtcattcagcaatgtatggtcataagcgccgtgcaccaatttcttcagcacgctgaaattcacgagaaagcccgaatcgtccagttcatcccccgcaactgtaatatttactgtatacgtgtgcccgtggactctgctgcacgctccggcgctttcgcggggaataaagtgcgcggctgagatgtgcatgtccttattcaactcaaacgaataaggatgctgaacctgcggataaatttgagaaagcaattagtttcgctctcctttcattttcatatattcatcatatcctttattgcggagcaggcatgccgggcattcgccgcatccgtccgcaatgatgccgttatagcaagtcagtgtgttattctttacaaaatcgagcgcgccgagctcatccgcaagtttccacgtttccgctttgttcagccacataagcggcgtatgaatgacgaacggcttttccatcgccaggttgacggtgacattgcaggatttgacgaactcgtcacggcagtccgggtagccgctgaaatcagtctcgcaaacaccggtgataatgtggcgcgcgccgatttgatatgcaagaatcgatgcaaaggataaaaatacaaggttgcgtcccggtacaaaggttgtcggcagttccccgtctttcgcttcaatttcgatatcatctcttgtcagcgcattcggcgcgagctgatttaaaagagacatatcaagcaagtgatttttgacaccgagcttttcggcaatcgattttgccacatcgatttcttcttggtgacgctgattataatggaatgtaacggtttccacttcttcaaagttttgcatagcccataataaacaagtcgtgctgtcttggcctccgctgaacaccacaactgctttttcttttttcatgtctttctctcccttatctatcattccataaaaaaagcgcctttttcggagaaggcgccctaaaaaaacataaaaaaaccgtatccaaggatacagctcgtccttagttttttatagagggtgtagctagaacctctcccgcatcaatacggattttcttcttttttcacttttgctatcataccataatgttgtttcccgtgacaataaaaaaacagcctgaaccctgtgtcaggctgcaaaatcgggtttaagccccgcgttttttccccggaaataccatcagcgcaatcccgatcagaacaaataaagcaggccagaaaacagaaaccggaatgatcggctgattcgtcatcataaagcaaagtgctgtcaaggtcagcaccgcaaccgggatgagcagcgccttctgtttcccgccgaacagccacagctcaaataaaccgaatgccgttgcaagcaggtaaacaggccatgtcacaccggagtaggaccaattggttgccgtttcaaagacaaacaagatccccgtaatcaataagatgccgcccggtacaagaagtcctgcgtttttgacaggtttcgggccgaaaatcggaatgtgaaaagcggcgcccagcaaaagaatgagagcgggccagccgcgttcgctgatggcttcatttgcattggtgaatatgccgaaaatgcccgcggcgcacagaaccgccgcagcagtcaaaagccctctttgccttctgccgaacagccaggcttcaaacaggccgaacgcaacggcaaagaggtagacaggcgatgtcacatttgcgtatgtccaatccgtcagcgtttcaaaccataacaacccgcccgtcacaagcaaaatgccgcccggaataagaaggcccgatctttttttcggctgcataaaggcagcggcgtgaaacaaaagcgcggctgcgatgatcaaaagcggccacagccccgtcatcagcataccggcaaagcatagtgctcccacggctgtcaggatgaaagcaggaatcaatacacctaacttcctcccgccgaaataccacagctcaaacagaccgagagcaggcgcccatatataaacaggccacgtcacgcctgaatacgtccatcccgttgccgtttcaaaacaaaacaggcagcccagcacaaaaaacataccgcccggaacgagcagtcccgcctggtcaggcgtttttttcgcaaaaataaatccggcgtgaaaccctgcggacattataatgaaaagaaacggccacgccgaacctgcggatatatgaataactcccgccctctgtaaaaaaaacgcaatgccgatacaaataaaaataaatcccaataatacacgtcgagctttcatctcttactcctccccatcatttcccaattcattatacagaaatgtcaggaaaaaagaaggggaattcccaaaaaatacagacattttccttatatccttatttttctttcgggatttttttgcaaatcaatgcgccgatgaaagcgaggctcacatacccaaacaccggataaacggtggaaatcagctgtccgtagccgatttggctgataatgaaagcaaacgccaaaatgccgccgtaaatatatgtactttttatatgaagaaaactgtttaattgtttttccaatccgtataaattaccgatgaccgacgtaaacacttctccgaaaataataaacaaataaatgatatgaagcgaacgcgaatacgaatagacgacttgagccatcggaatgtcaaactccagcacatccggcagcaccgataatgataaaaagctcgcggcaagcaccagtgtcaacagaacgccgccaaaataagccccccttcggatcaccttctctgaagacatttcattcgcaagcggcacaagcacggcttgggcgagcgataaatttaacgcgccgtaagagacggcggacaaaagccaattccacttgtcaggccatacccattcgtccgcgtttctcgtgcttgtaaatacaaatgaatctgctgtcacgataaaagagaaggaaattaaaagcggcacaaccaatatattgacgccgaacacacctttaacgccgcttgtcatgacggcaaagctcagtacgatcgtcaaaaggatccccgcttgtgcggaccagccaagctgttcatgaaacagcgctcccgctccggacagcatgacagaggtcactcccagcaatataaacatcataaacatgttcacggcgcggccgatggactggccgaataaatatgtgttcaattcctgataagatgctgcatgaatccgtttggaaatgatcatgattttggcgcctaaatatgtaaacatcagaccgcttaccacgataccgaacagaccgatccagccaaacttcagaaaaaactcaacgatttcccgtcccgtggcaaaaccggctcctacaaccgtgcctacgtatacaaatgcaagctgacttgcagaaccttttgtttgtcccatttcaccctccggctaagcgcagatttgtccaggcctttatatatgcttatgagacaagtcgcccgaaaagacgaacaaatcgtccttccccggagaaaacagattcagctctctcctctaagcaaaaatattgaaagaaaaaaagggccggcgtatactcttcatcaagaaaggtcaaaacatttcatttcctttctgactatattggtcaaaaataatcaaacctcacaaatatcacttatcatgctgtaaacatttatttttcagggtttgaaacaaaacacttgaaagtcaaagaaggtcagagtatactattaatcaaagaaggtcaaagttaagaccttattttctaatccatttggtcaaagatgatcaaacatttttcgaggaggttttggcaaatgcgttgtcaacattgtcagaaaaacgaggcgacgattcgcctgaacatgcaagtcaattccattcaaaaacaattcgttttatgtgaaacatgttatacagaattaacccgaaaaccgtctatgagcatggggccgcaatcattcggattcccgtttgagcaaggtttcgctcccaatcaaaataaacagcaggccggccctgaaaaaggcctgctcgacgagctcgctcaaaacgtcacaaacggcgcaaaagcaggtctgattgaccctgtgatcggccgcgatcatgaagtggcgcgcgtaattgaaattttgaaccgccggaataaaaacaatccggtgctgatcggtgagccgggcgtcggtaaaacggctattgcagaaggcctcgcgcttaaaatcgctgaaggcgatgtgccgaacaaattgaaaaacaaagagctttacctgcttgacgtcgcttctctcgtcgccaatacagggatcagaggccagtttgaagaaagaatgaaacaattaatgaacgaattaaaagaacggaaaaacgtcatcttgttcattgacgagattcaccttcttgtaggcgccggctctgccgagggatcaatggatgccgggaacatcctgaaaccggcgcttgccagaggcgagctgcaggtcatcggggcgacaacgctgaaagagtaccgccagattgaaaaagatgcggcgcttgaaagacgcttccagcctgtcatggttcacgagcctacaatagaacaagccatcagcattctggaaggcattaaagataaatatgagaaataccacggcgtcacattcagcaatgaagcgataaacgcctgtgttacgctttcatcccgttacattcaggaccgccacctgccggataaagcgatcgacttattagatgaagccggctctaaggcgaacctggagcttgataccgtaaatgaagaagatgcggctgagagactcaaagcaattgacgcggagaaaacaaaagcgcttcatgaagaaaattatgagcttgccgcgaaactgcgtgatgaagaagcggcgttggaaaagcagctggcgcatgaaacaccggcctcttcacctgaaatcggggcggagcatattcaagccatcattgaacagaaaacaggcattccggtcggaaaactccaggctgatgaacaagtcaaaatgaaggaacttgaagagcatcttcatcagcgcgtcatcggtcaggaaaaagccgtgaaaaaagtggcgaaagcggtcagacgaagccgcgccggcttaaaatccaaaaacagacctgtcggctccttcctctttgtcggaccgaccggagtcggaaaaaccgagttatcaaagacactcgcagatgaactgttcggtacaaaagattccattatccgtctcgatatgagtgaatacatggaaaaacacgccgtatcaaaaattatcggttcaccgccgggatatgtcggacacgatgaagccggtcaattaacggaaaaagttcgccgcaatccgtacagcatcgtgctgctcgatgagattgaaaaagcccaccctgatgtccagcatatgtttctgcagattatggaggacggccgtctgacagacagccagggcagaacggtcagcttcaaagataccgttttgattatgacaagcaacgctggaaccggcgaaaaacaggtgaaagtcggattccaatctgaagagagcgtcctggaggaacaaacgctgattgattcactgagcgcgttcttcaaaccggagtttttaaaccggtttgacagcatcattgaattccaatccctgaaaaaagaacatctcgtgaaaatcgtcagcctgcttctcacagagcttgaagacacattaaaagagcgcggcatcagcctgagcgtaacggacgaagcgaaagaaaaaatcgctgaaatcggctaccacccagctttcggagcacgcccgctcagaagaaccatccaagaattgatcgaggacgaaatgacagatctcttattggatgacaacgaaataaaagccttccatgtcgtaatggaagaggacggcatcaaagtccgggcacaataagaaaaaagcggttccctcctcgcggggagccgcttttttgtttctttctccatgccgaaagggagaaactgtgaagaattcgggaacaatttctcaatcaccctaaagttccatgcactgccaccgatattaaccatagaaagctagtataaaggatttggtgaaaactatggataaaacatcgattatcggtatcatcctcgccttgattgctttaagcgtgggcatggtgctgaaaggggtcagcttaagcgcactcgctaacccggcagctattctgattattttgttcggtacgatttctgcggtgatcatcgcattccccggaaaagaaatcaaaaaagtgcctgccctttttaaagtgctgtttaaagaaaacaaacagctgacaattgcgcaattaattcctatgttctctcaatgggcgcaaatcgccagacgtgaaggtctgctcgcattggaagcaagcattgaagacgtggatgacgcatttttgaaaaacggcctgagtatggcggttgacggacaaagcgcagaatttatcagagatattatgactgaggaagttgaagcgatggaagacagacaccaggccggcgcagccatctttacacaagccggcacatatgcgccgacactcggcgttttgggtgcggtcatcggccttatcgcagctctttccaacatgaacaataccgaggcgctcggacatgccatcagtgcggcttttgtcgccacccttctcgggattttcacaggatatgtactatggcatcccttcgccaacaaactgaaacgcaaatcaaagcaggaagtcaaactgcgtgaaatcatgatcgaaggcgttctgtcagtgcttgaaggacaggccccgaaagtgatcgaacaaaaacttctcatgtatcttcctgcgaatgaacgcgcaaaagtcgctgaacaagaaggagaggcaaacaatggcgagaaaaaagaagaagaagcatgatgacgagcatgtggatgagtcttggctgatcccgtacgcggatttgctcacccttcttttggctctgttcattgtattgttcgccatgagctcggtcgatgcggcgaaattccaaatgctgtctaaatcatttaacgccgtgtttaccggaggcacgggtgttcttgaatattcaagcgtcacccctcctgaaaacgaaaaagacggcgttgatcagttaaaaaaagacaaggaaaaagataaagaacagaaaaagaaagaaagagaagcagccgaccgcgaagaacttgaaggcgtgcaaaagcaagtcaatcaatttataaaaaataaaaagcttgaaactcagctggaaacaaagctgactaaagaaggactcttaattaccattaaagacagtatcttttttgattccggacgggcggatatccgtcaggaagatattccgcttgccaaggaaatctcgaatctccttgtgctgaatccgccaaggaacattattatcagcggacatacggacaatgtaccgattaaaaactcacaatatcaatctaactggcatttaagcgtcatgcgggccgtcaacttcatggctattctcacggaaaacccgaaacttgacgcaaaagtattcagcgccaaaggtttcggagagtataaaccggccgtgtcgaacaaaaccgccgaagggcgcagcaaaaacaggcgcgtcgaggtattgatacagcctagaaacgccgcgactgaccaaaatcagtaatataaaaaaggaagcctttcaaatggcttccttttttatttctgatgaaaatgtttagcgtttaaccccactcttttcagcatttccgtacacatttctatctcttcatcactcaacacactgatcatttctttaatttcgtcagcatgatcagggaaaatatcgtccaaaagacggattcccttttcggaaatctgtgcgaaagtcactcttctgtcagtcggcgaggcttttctgatgagaagttcttttttctctaatttgtcaacaacgtatgtaatacttccgctcgctaataaaattttgtcgccgatctgctgaagcggctggttgcctttgtggtacagcagctcaagcaccgcaaattccgtcgggttcaggccgtgcttatgaatatgtttattcatatggtcgttaatagatcggtacgcacgtgacagtacaataaataatttcaatgagttttctgttttatccgtcatacattcaatcatccttttacaaaagaaaccgttacagagaaacattaataaacaaaatgaaaaatgtcaacaaaaatgtttccaaaatttctcttctttttgtcagaccttaataaaataatttgtttttctatcattttggttattttttcttattaaagaagtataaaaatgatataatacctctattcaagtgtaatgttggagcgatgcagagtgaatacatttaaaggtgcccggggaaagatcaagctttatctcatattggtgatcatcccggcacttattatcagctttttcatttatgaaaaagaaaagcagaaaatagccgataaacacatacaggaagccagtatgatgctcaaccttcaccgcaataagctcaattatttaatcggtgaaacaaaagcccggatgacaacacttgcgatcgctgtcgataagcctgtcaatgaagaaaagatcattgacattctcgatcaggcttttgaggatgaacccagattcagcggtctgtatatgctgaattccaaaggtgatgtcatcgcaagcacgactgatctgaaatcaaaggtgaatttggccgacagaccgtattttacgaaggcgaaaaagacgaaaaaaacggtcatcacaaatgactactccagcagaattacaggccagcgcatcttcacgatctgcgtgccggtgttagacgcaaaacgggaagtcacggattatttagtagccgccatacaagtcgattatttgagaaatatgatcaatatgctgagccctgacgtttatgtcaaggcaaccaatcagaataaagtgatatttgccagcggacgggctgatcaatcagaaggtgtgaaaccggtcagcggctatctggatgatattaattggaatatcaatgtttatccgaaaccggttgagctgaatgagctgaccaaaagcgtgctgctgccgatgtccagtattgccgtgctgctgaatattctgttcatcctcgttcaatattatttgcttaagcgcaagacccagctggagcgcgctcaaaatgaagcgcagaaattggagcttatcggaacgcttgccgccagcaccgcccatgaaatccgcaacccgcttacagggatcagcggcttcattcagcttttgcagaaaaaatacaaatcggaggaagatcagctgtatttctcaattattgagcaggagattaaacggatcaatcagattgtcagtgagtttttagtgcttggaaaacctactgctgaacggttggaagtgaactcgctgcaggatattcttgatgagattatgccgattatttattctgaagggaatctatacaatgtggaagtgaatgtggagattctcgtcaatcggccgctcaaggtcaactgcacgaaagaccatattaaacaggtgattttaaatgtcgcgaaaaacgcgctggaatccatgcaggaaggcggccggctgtccatctatttagaagcccgcgatcataaagcagtcattaaggtggccgacaacggaatgggcatttctgaagatatgcttgagcacatttttcttccgtttgtaacgtcaaaggaaaaaggcaccggcctcggccttgtcgtatgtaaacgaatcatgctgatgtacggcggttcgattgacattcaaagcgaagtcgataagggcacagaggtcaccattaccctccctgccgcttctcgatgaaaaaaacaccctgatcggggtgttttttatttaaagaagagtatgtgtaagaggatataccagaggaacggcatcatagccggcagatagtacgaggcgcttcgtgagccgtgccagcggaaaaatgtgctgactgtacgcggtcatctttcggatgcggcgcttgatcaggaagcgcattcagtcttcgttatctgttttatcatccatcatttgtttgcttcatatgcaggcatgacgtcaccgcgggagaacaagcctattttcttcacaaggccctgtattccttggtgatgtgtacgatcacggtttaccagctgctgatacgcgttcatcagacagtccagttcctggctgtgcctgatcgtgtcatatcctgtaaacccttgcctgttagccgcatctatcatcatttttctttttttatcaatagatagaagcaatttttcttgttcagaataactgcccattcacttcacccctcaccgctaaaagaataggaaacaagtttgattgggttattgagcattattacagattatactttatttgtaaacatttttttactaaataacttattttttcatttcatattggaatctttagcatgaataagagaataatacccattcgggtaatgatataaacagaatgcggcatattcaagaattaaaaaacagccaaagctgactttatattacaataaaaaacctctcatgccggtgggtgcatgagaggttcgggcgtctatcagttttgcacactttcattttcgtaaatcggcacccagccctcagtcgtcacgaagattcggattgcgacgacccggcggtcttcctgaagcgtaaagtagtggcggatgttctccggaactgaaatcaaatctcccggatttaaacggacgtcgaaaaatgtgccgtctttgccttgaatgacgaagatgccgtgtccgctgacgataaagcggacttcatcatccgtgtggtgatgttctctttggaaattttttaataattcatcaagattcggcgtggtgtctgataaagaaatgacatcctgagactgatatccgcgccgggctgaaatgtcctgaatctccgtgtcaaacgccgcgagaatccgttctttttcatcttcggttagatcgtatttttccgaaagctcagacggaagtttttcaatgttccactgctcatagatcacctcttgttcgtctaagaagcgcgctacttcttcctgatgttcaatgagcgtatttttttcgtcatgaattctgatggtcgccattttctattcctccttttattttaccagctgcggccgaagtgacagaagcttgaggtgacagctgaataaaaattcataggcttccagcacccttttcgcttcaaatgcggtccgcccccatgccgtaatgccgtgattgcggattaacaccgcgcctgagccggcggccgcatggtgcgcgaagttttcggccaatgccgggatgtgcgccggattgtcaatgatcggaacggtcacggacgcgttttcctcccataatccgagcgccttaatcatctcctgcccctgaaaagtgatttgtttttcatccccgtaaagctctgagatgacattattattgacggtatggacatgcagacagcagccggcgtctgtcttttggtataagtaagtatggagaagcgtttccgctgaaggttttaaagaatggccggtctcagcgggcttcccgtactcatcgattaagagaaaatcttcgtctgtttcttttcgtttgtcttttccgctcgccgtaacgagaaaagtcagcggcccgtcggatactttgatggaaagattcccgctcgttgccgggaaccagtctctttcagccagctcgcgttttacctcggcaagttcgcgccagcgttcttcttttgcagccatgcctgcacctccccgatgttttcaatgcctgttttcacctcatgaaaatcttgaaaaggcagatgccggaggccgagttctttgcattcagtcaaaagataatctctcgcaaagcacatatcggacaactttgcagcctcgacatccgtgaccgaatcaccgatcataatgagaaacttctgctgatcggatagcttacggatgactgacggtttgcagcagccgcattgattggtacagtctccgtcacaggcgtgcggccagtctatatgaatatgctcattgtcaaaggatgcatgattgcagaaaatccgctccttttctacgatcccttccaaaagcggatgcacaaaaaagtccattcccccgcttacgatataaaacgggaggccgtttgaccggacaaacgagacaaaatccaaaaagccgtcccgtattttcgcatccttcagaataaagccggtcagttcttcttttaagctgctcggcagcagtccgaacatccggccgactccttcttggattgatatgcttttagacagaacaccgtcttttaattcaagccactcaggaggcgcgaattctttcatcatgctgacaatgttgtcgttcatggtgaccgttccgtcgaaatcacaaataatcagcggtgtgcgggtcatacggcttccacccttccccatttgtctaatgcgagctgaagatctttgcacgacgcggctttttcttcaatcggctgcgcttcaagcaccgcatcaatgatggcgcggaacgcttttcccccgccctcggctcctttcggatggccgtgaatgcctccgccggcattgatgatgtgatcgatgccgaaatcgcgcatcaataatggcaccataccggggtgaatgcctgctgacgggacggcaaacgacggatgaaagacatcgtcttttacacattcatcatggattgcaagcgcggactccttcggaagagcaacggatccgtaaggtgacggaaataaactgaaatcagcgccgcaatagcggttcagcttgccgagcaaaagcgcatgcgacaagccgtaaacgggagatgatgtgaacgcgccgctgactgccggatgcgccatgatcggaagcgggatttccctgtcctcagcaaggctctgcatcacatctaaaccgtaagcaaacacattcaataaaagcgcgtccgccccgagttctgccgcgcgcctcgctttatcccgcaattcagcggtccttcccgtaaggtttacggcatacagcgttttatgccccgtttcctcccgggtttccttcaggacttgttttccttcgataatgcgggtttcaaacggagccagttcattttcaaagaaaatttcgtcatctttaataagatccacgccgccgagcgcctgctgtctgagctgttctttaatgtcggcgagatcccgtccgatcacgcctttaaatatgctcatcagaagcggtctttcaaattcgcccagcagtttgcggatgccgtatataccgaatttcggcccgggaagggagcgtttaaacccttcggaaaattcaagatcagtcaattttatttttccgtccagtgacagctttccgaataccgtcgtcaggacggccggaatatctcttgaaaaattcgcctcgggataggcgatggtgatgacggattgtgtttcgttttctgaggttccttctttctcctcaacttttacgacccgccctttatgttttctgagctgttcctgcttcaccaggggcaggtcagtccaggagcctaccgtcagccccgccgcaatctgttccgcccgcttttcactgtccgttgtgtctgtcagaagatatgttgccaatacttcgctcatgcgtgaacgcctctctttctttcgcaaaacataaaaaaacctcttccgtatgagcagaaagaggcttcgtgttatgtccgaatcttatctctcagctcctgctgcaagaattagcaccgtgctttatcagtcggttgccgggcttcatcgggctcgtccctctgcctgctcttgataagaataatgattttataaagtattttgaattatcgcattgttatcctgatatgtcaatgctttttcgggtgaaaagattcagtttcccgatcctttccgcagcttctttaagtctttcttcacttgtcagaagaccgactcttatatagccttccccccattttccgaacccgtttccggcagcgaccgcgacatccgctttctcgagcagcaggtctgaaaacgactgtgacgtataaccgtcaggcacagggagccatgcaaaaaaggagcccgccggagccgtcacatcccagccgatatcgcggcaggctttaatccatgcattgcgtctcgattcatatctgtcattttgcgccgcgacgcatgcctgatccgctaaaagtgcggctgccgccgcctgctgcgccgcgggaaacaggctgacaaacatatgatcctgataaaggttgatcgcttcgatgacagaagcgtttccgacggcaaatccgacccgccagcccgccatattatacgttttggacaaggtatagatttcgattcccgtctcttttgcgccttcggtctgcaaaaagctcagcggtttatgcccgtcaaagccgacggctccgtacgcgaaatcatgaacgacacaaatgccgttttgctccgcaaaaccgaccgtctcctcgaaaaacgcctctgtcgccacagcgccggtcggattattcggataattgagatacagcagcttcgcctcgctccgcaccttttcaggaattacgctgtaatcagggagaaaccctctttcttccgtcagcggcatcatttccattctcgcttttgcaagggcgacgcctgaccagtaatcaggatatccgggatcaggcaccagaatggtatctcccgggtttaaaagacattgcggaagctcaacaagtcccgccttgcctccgaacagcacggcgacttccgtttccggatcaagcgtgaccccgtactccctttcataaaatgcagcggctgcttctttgaagctgtaagcgccccggaatgatgagtatttatgattttccggcctttcgacggcgcgcttcatttcttcaacgatatgctgaggcgtcggctgatcagggtttccctgccctaaattgatgacgtctctgccttctttcagcttttgattcactttttgcaccaatgatgcgaaaaattgttccggcagctgtttgagtacatctgagatttcaaagttcatattttcaccttctaaaaatgtcttgaaatgatagtccatcatcatatatggttaaataaaaaaagtaaagagaaacttgaggtgttaaaaaatgaaatggaccgtttcctgtttgcaatttgatatttcatacggaaatccttcagaaaactttaaaaaagcagaatctttgattgagcaagaaagccgccatgcggatgtaatcgtgcttcctgagttgtggacgaccggctatgatctcacacggctagaccagctggcggatgaaaacggcaaagtttcggaacaatggcttaaagaaacggcaaaaacatacaacgtacacctcgttgccggatcttttgcggtcaaagaaggcgaaaatgtctataacaccatgtacatcgccgataacagcggacagatcgtgaagcggtatcagaaagcccatctgtttcagctgatggatgaacacctttacttgtcagcaggaaacagcgacggttcctttgagcttgacggtgtcaagtgcgccggactgatctgctatgatatccgtttccccgaatggatcagaaagcatacgtcccagggcgcgaatgtcctgtttatctctgcggaatggcctctgccccgccttgatcattggcgaagcctgcttatcgccagagcaattgaaaaccaatgttttgtcgcagcctctaactgcacggggtccaatcccgataatgaatttgccggccacagcctgattattgacccgtggggccggattttagccgaaggagaccggacggaaggcgcagtccgggcggaaatcgatgtgtcagaaagcgcggccgtgcggggaaccattccggttttccaagacttgcggcgtgatttatattaattttcaaaaaaatgttgacaagaatatccggcacctgctaatattttcatcaactgattaatccgaattgtgatacaaatcaatatatttttctcttatcgagagttgggcgagggattggccttttgaccccaacagcaaccgaccgtaattccattgtgaaatggggcgcgtacattttgcgccgagacgattgtctcataaggcacggtgctaattccatcagatgttatctgagagataagaggcggactgcactgtttcagcctccttctctttcagagaaggaggctttttttcgggcgtattctccgtcacgatctcttactgccactacataattggagggtaaatccatgtcagcaactaaaataagtctttatgaacaattaacagaaagctccgccgccgcgttagccgtcaagctcggcttattccaaagcaaaagcactctgacatgccgtgaaatcggcgacggcaatttaaattacgtctttcatgtttacgataaagaaaacaaaaaaggactgattatcaaacaggcgattccttacgcgaaagtcgtcggtgaaagctggccgcttacaattgacagggcgagaatcgaaagcagcgccctcatccgccagggcgaacacgtgccgcacctcgttccggccgtttactattccgatactgaaatggccgtcacggttatggaagacctctcgcatttgcggatttcaagaaaagggctgctggaagggaagcattatcccaacttatccgcccatatcggtgaatttttagggaaaacgctgttttactcatccgattatgcgcttgatgcgaaagtaaagcagcagctcgcaaagcagtttacaaatcctgagctttgcaatattacggaaaggcttgtgtttacagaaccgtttctcgaccatgagacaaacgattttgaagaggagctgcgcccatacgcagaaaaagtttggaacaattcccggctgaaagaaggtgctgacgaattgaaagccatctttctgaattccgcggaaacattggttcacggcgatctgcacacgggaagcatcttcgccgatgaacatgaaacaaaggtgattgaccccgagtttgctttcttcggaccgatcgggtttgacatcggccaatttatcgccaatctgctgttaaacgccctcagccgcgacggtgacgacagacagccgttatatgatcatactgccgccgtatgggatacatttgtgaaaacattcagtgaagcatgggagaaagactgcttgccttcccgcagacacctgctggaagacacactgaaaaacgcgtttgaggaagcggtcggttttgcgggatgcgaactgatccggcgcacgatcggactcgcccatgtggctgacttagatgaaatcactccgtttgacaaacgaatcgaacggaagaagctcgcgcttgacatcggcgcctattatatcgaaaacagaaaaaaactgaagcatatcaccgaggttctggaccaatttaagctccgtgtaaaggaatgatgcagcatgaccaatgaatttgccatcccccgttctgtagaatggaaagaaacctacatccgcattttaaatcagcaaaagcttcccgacgtcactgaatatgtggaacttgaaacaaaggaagatgtattcgacgcgattgtcacgctgaaagtaaggggcgccccggccatcggtataaccgcggcgttcggactcgcgctctccgccaagtcgtttgaagcccgcgacctttcggatttccgacgtcagttcgcggatgtcaaagcgtatttaaacagttcgaggcccactgccgtcaacctcgcgtgggcgcttgacagactgacggattccatcagggatgcgatctcaatcaatgaagcgaagacaacgctcgttcatgaagccattcaaattcagattgaggatgaagaaacatgccgaatgatcggccagaatgcgctgcacctttttaaaaaaggcgaccagatcatgaccatctgcaatgcgggctcgattgccacaagccgatacggtacggcgcttgctcccttttacttagcgaaacaaaaagatctcggccttcatatctacgcatgtgaaacaagacccgttctccaaggatcacggctgacggcgtgggagctgatgcagggcggaattgatgtcacgctcattaccgacagcatggccgcccatacaatgaaggaaaaacatatttctgcagtcattgtcggcgctgacagaattgcaaaaaacggtgatacggccaacaaaatcggaacgtacggcctcgctattttggcaaacgcctttcaaattccgttttttgtggccgcaccgctttcgacatttgacttgcagattgaaaacggctatcagattccgattgaagagagagatccggatgaagtcagacagatctccggcatacgcaccgctcccgaagatgtgccggtcttcaatccggcctttgacatcacaccgggcagcctgatttccggcattataaccgagaaaggaattgtgaccggctcttacacggaagaaattgaacaattattcactgactgccagctgagctgaaaaaccgctgatgatattgcctcaggcaatgtcagcggtttttttgtctgcacaatgtaatcacttcatctttttggacggctgtaatgagatgcattttaaaaaacagctctgcataaccggctatcttttgcggacggctcattttcatcaggcttcgtcctcctttttcatcagaccaacttttttcacttaataaaatgatatgtcggacgtgaaaaaacggaacgtgccatacgctttatttttctttataggatatttgttcgatgttcaacagcaccgcttttacatccgtcttcgtgcccgcgtatcccgttaaggcgctgtttttgccgattacccgatggcaagggatcaaaatcggcagccggtttcgtttattggcttgtccgatggcgcgcaccgctttcggttttccgatcgcttcagccatatcgccgtagcttcgggattccccgtaaggaatcatcgtcagcgcgttccataccctttcctgaaagggtgtgcctttttgtctcagaggcagagagaattgctttctttctcctgaaaaatatgatgccagctgctgtttcgcctccgacagcaaagcggtttcgcacggctttacgccgggcgcgtctttccgccattcctcaaaatcttccccggtgagaaacaggccggtaataaagctctcttcctctgttatgatgacggttccaaacggcgctctcacacttgtaaaacagatcattccccgctccttctttcttcggtattctgccggatcggaagcgtcaaatgaaaaacggtgcccttcccttcttcactttccacatgaatgcgtccctgatgttcttcgatgattttatagctgaccatgagaccgaggcccgttcccctgtcttttgtcgtgtaaaatggttcacccagacgttttaatttgtcttcggaaatgcctgttccttcatcttgaatagaaatcaaaatgtggtcttgatcagaagactgaatggtcacgtagatattgccgccgcccggcatgacttcaatggcgttttttaaaatattgataaacacctgttttaattgattcggttcacagtaaatcggcgggatgtttccggtcaggttcagatggatctgcacattgacaagattggcctgggcattcaaaagatcagccgtgtctttcataatctgcgtcacgtctttttcttcatataatatcgcctggggtttcgctaaaattaaaaattcagtgatgatagactcgattcgttttaattctgaggtaatgacgttaaagtacagagaatattcgccttcaatgcttccttgaagaagctgaatgaaccctttcagcgccgtcatcgggtttctgatttcgtgggcgatgcccgccgccagctcccctacaacatgaagagtgtcggatttccgcagcctctcttcaagctctttggcctctgtgacatctttaaagatggccagattcatattttgaatgatatttcttttgaaggagaattccagtttgcggctgtcgctgctgcttaacaggaaggggatttcattatccattccttctaaatcaatctttctggcgggaacacccgcgttttcaatatcaaataaagaaagaatatccggaacggtgtacgctctcagctcctcatccggcataccgagtatacggcttgcgagaggattcgcgtcaataatgcggaattggttgtcaaataagaccttgccgtccattgagccgttgaatacttttctgaatttcagctcgctttcccgcaattccttttccatccgcttacgatcgctgacatttcttaaaatggttaaatgctgaccttcaagtatggttcgttttgatgtgaattccagctctttaaattggccgtttgccatctgaaacagcatttcttcacggatttccccgtatttttcatattttttcttaatctgtttgtattttttctgcggatcaacgataaacgtacataaattcgtctccaccagtttatccatcggcagttcgaaaatgcggcacgccgattcgtttgctttggcaatctttccgtcatcagaccaaatgacaatcgcgtccatggcgttttcaaaaatttcgcggaatcgctcttcgcttttgaaaagtttcaattccatcaaccgtttctctgttatgtccctcataatggacatgtagaacccgctgattaagttggacgtaatcgtaaattcaaacagcttctcttcgcccgaccgaagcttgacgggcagttctcctttggcgtttccttttctgcggagggtttcccagatttctttcagatgctttttgttttctccgtcggtaaaatggcggagcgacagatgggacaattcattctggccgatctcaaagcttttgcaaaaagagaggttcgcatcaataaacccgccgtccttatcaaacagcacgatgccgtcgacagccctgtcaaacaaatctttaaacagctgctcgttcatggagaattcgcgctctaatatttttttagaggagatgtccctcatcaccacaaaaaaataatcctccccaattccgtctctggcgaggaattcaatgtatttcgtcgcgccgctgtcaagcttaatcggcacctctttccacagatggcctttttttaaaaactttttcacggccttattcagttcttcctgaggcacggaatataaaaaatccaggacggagcggttaatgaggttctctgcctcaatctgcatcatccgggccgcagcctcgttcgcctggacgattttcatttccttacggcatataaaaatggcatcaagcgtgttattcataatcacgtgataccggttcaaatcactcttcaggcggtcattttcctctttcatccgcttcagctgctctttcagcgactcgtttgtttgcaaatccagagtttcagccattcagtacactccttcttcaaaaacctatccttcaatatttctacaaaatacctcatcttccttcattcgccctatacatttcagaaaatttcaatgatatgacaagttaaagtctttttctacgatccttacctccccattacatcatcctaacaatcccttttgtcctccttcaattttttgttttttattttaaaatgaacaccaacaggaaataatcatgcagtggatgatttttgaagagaaggtgatgctatgacaaaatcgcgagacagttactttgacaacgccaagtttatcttgatttttctggtggtgttcggccatatcctccggtcatttattaacggaaatgagtttatgctccacctctacaaattcatttatacttttcatatgccggcctttatcctggtttccggctatttcgcaaaaaactttaagcggaaaggttatgtgaagaagctggctgtgaagctgattattccgtacctgatttttcagggcatttactcagttttttactatttgattcaggatgaaagcatggcaagcgtcaatccgattgatccgcagtggtctctctggtttttagtcagcttattcttttggaatctgctgctttacccctttacgaagctgccgaaaatgtgggcgcttggggcgagctgctggcttgccgtcatgatcgggtatcttgattttatcagcagcacgctgagtctttcacggacgtttgtttttctaccgatgtttctcgtcgggttttatttaaagaaacggcactttgatttgcttcgggctaaaagaggcaggcagattgccgcgggcgtactggggattgttttcctcttatgctggtgtattgattttgattactcgtggctgttcggatcggagccttattctacattcggcacagtgtcgctgttgagcggtctgtcgcgcatcggctggtatgttttggcctttgccgccactttcagctttttggcgctcgttccgcaaaagcgttatttctttacgaaatggggtacgagaacgttttacgtgtatctgctgcatggattcattataaaaacgctgcggcagatcgggcttgaagatcacttatctgattatcagaatttagtcatgctcttaattttaacggccgctcttacgtccattctctccagcaatgcggtgaaaacggccgcacagccgtttattgagctgcggatcaccggctggcttgaagcggtgaaaggaacaagaaacagtgcttattcgaaataatgcaaaatacctcttaagcgttatcgcctaagaggtattttttattgtttgccgtcttcttttttctttggcttcgtctgttcaagcgtttcaatccattttccggcgttataatcaccgagctcgcttgcaaactcttcttcaagcaatttagggtccatcggctttttatggttttgcatgtctttgctgtggcggttttttttcgtcatgttactcgcctccttgtttgccgtgttttgatttgcggtttgcgcctctcagtccgggatcaccgtcatattgtgttttatatgcatctttgtccatgctctcagtcggtgtgttgttgttcgtcaaagcttcattctttgctgctttgcgtttcatttgatttcctccttctgtcagcaaatctgttttgaattcatcaagcatttttttcaagtcgcgcactgtcacgtttttggcctcatcaaggagctcatagccgatctgtccgttcggctcaagcagcacatatttaaaatcttgaatgtctccgaggccttcctgcctgatcctcattgacagctgagattcggtaaaacgcattttttttaagttttccgggatgacttttccgtttctgacaacggcgacggtttttcctgaaaataaaaactcaaaaaagcttgatttgatttctaaatattccatcaggattaataccgcaataaaaatcgccgccgcgaaaatagtttcccataaattatgttcaataaacggctgaataataatcgagccgatcgaaatcatgatgactgtctgggtcaccgacagctggctgattgatttccgtccggcaatccgcaataaaaaggtaccgaccgctatcataactaccgacttccaaaatacggtaaacaatgacgtcacctctttacaagtagaatctccaaagaaactgtttccactcatccattttacggcaataaaaaacaccgctttctgaaaagcggtgtcagccgataatcattctttccttcggatagtgataatttgcttcgatttcttttcggccgatcagataaaggaacgtcaaaatgccgatccggccgataaacatgacaatcatgatgacgcattttccgatgtcgcttaaatgcggagtaatcccaagcgacaggccggtcgttccgaatgcggaacacacttcaaaaagcagtccgaggagcgtctgatttttctcggtcacggccagaatcagcgtcgatccgaacacgagcagaatcgccatcatcgtaacgaccagcgacttcatgacatcagcctggtgaagctcgcgtttaaagaccttgaccgctttatttccccgggcaaaatgaaacagggcaagaaggttaagcgcaaacgtcgtcgtacggattccgccgccgaccgagctcggtgatgcgccgatgaacatgagggcgcagatgaaaaataatgtcggcgccgacagctggctgatatcaattgtcgcaagcccgccgcttcgcgtagcggttgattgaaagagacataaaaataaaacatcatgccagcttttccccttcatgacatggcttgcttcaagcgcataaatgcccacggctccgaacaaaacgagcattccgaacgtaacggtcgtaattttcgtaaacagcgtgaatgagtatctgcgctgttttgaaaacaaaaagtcctttacttctacgagcaccggaaaaccgatcgcaccgaaaataatcagaagcatcgtaataaactgcacgaaatagtcatgtctgaacgggacgagtgaatttcctgtaatatcaaaaccgccgtttgtcgtggcgctgacgctcgcaaagaatccgtgcaagtacgcctgttcaaacgaatcataatacgttaaaaaatatgttcctaagatgatgccgcctaaaaactcgattaataaaatcaaaaacagcacttgcttcatcaggttgacgataccggaaaactgcgattgattctgatccaccatgatgagcttccgttcccgcagaccgatccgtttgcccataatgagccagacgaatgttccgagcgtcatgatgccgattccgccgaattgaagcacgaaagccaaaatgacaatcccggccgtgctgaatgtatcagccgtgttgacgaccgttaaaccggtgacactgactgagctgacagccgtaaacagcgcgtctataaacgaccagctggccccttgtttgtgggcggccggcagacttagcaaaataaatgccaccgtcacagcgagaaaataatataatgcaatcagctgtgcaggcgacaagatctgtatgaatttcttcagttttaatttcataagatagttccttctgcctctcaaatgtagtacgtaattattctaatgatattgggagaatttttaaaggtctttttagaaagatttttcattaccttatgtaatttgccgatctttaaacaaaaaacctctgaaacgattgtcagaggttttgttgattattttgcttccagcctgcggatgcgctcatcgagatcagggtgtgtggagaacagtgacgaatgctttttaccgttaatttttaacgtctgcaccgccgtctggtcctcttcattcacatgtcctgtataagacttcagcgtacgcagggcgtgaatcattttatccttgccggcaaggtctgcaccgccgcggtcagcgtgaaactctctatggcgcgagtaggcgaagacgacaagactgccgagaatggaaaagataatctgaaacacgatcatcgcgataaaatgaacgaccggcgcgaggtcttctttgacaaagcggcttgcaacccatgccgcgattcgggaaaggaatacaacgaacgtattgacgattccctgcagcagcgtcatcgtgaccatatcaccgtttgtgatgtgtgcgacttcatgggcaagaaccccttccaccgcagcatcatccatctgctgcaataaacctgaagaaaccgcgacaagcgaacggcgcttagaaggtccggtcgcaaaagcattgacctccggggaatgataaatgccgacttcaggcattttcgtcatccctgcggcacgggacaatctgtgcacacggtcaaccaattgttgttcttcatagctgagcgactgtttcttcggatttaacacccggacgcccatcatcgttttggccatccatctggacattccgagagaaataaaagaaccgacaaaaccgacgacaagactgaacacgagcaatgccatcagatcaatgcggccattttgtatatacgagccgacaccggtaacgcttgtaataatcgtaagcacaattccgattgtcgtaatgaccaaaaggttcgttaaaataaacagaaatattcttttcgccataattacctccgtcttttttaagatcaaaagaacttatttacttaaattataaatgatctgtttgaaaatgcaacaatttcgacgtatgatgttaatgtaattctcagtgatattaaaaagtgaacacgtaatcaatcagaggtgaaccatgaacacgtttaaactgacccgaactgatatggtccggcttctttacgcgctaaaaggccaaggagacgcaacccctctccaaatcttattgcaatcagcggatatgaccttggatgaggcggaaagccgtctgcatatccctgaatttctgacgagattcgaacgaaaaaaagagaaaaaggaatacgggctttcaactaacgagattgtcgagctgggaaatctgtgcgagctgacgtctttaaaatcaaccgccgtccaaaactgggtgaagcgcgatattaaagatttaatcggccaccccttactcggcaaaaaatatacaattgaacaagctgtcatccttctcattgtacgtgatttaaaatcaatttatgacttcgaacatatacgcggcatattaaaaatcgcttttaacacgatcacagacagatcagacgacgtcatcagcccgatcagctactatgaaagctgcgcccaagtgattgattatcttcatcataaggcaaacccgccgatgaaggaaacgagcctgcaggagctcgtcgaagagcagacggacaagctcaaaggctgctttaaagaactcggaagcggacaatggaacaatatcagatccataatcgccgtcacggtgctctccgttttgactttccatattcaagcctcagcctacaaaatgaccagccatttattataattcataatgcttcttcgccccggtgtctgcgccgggttttttttgctgtacaacaattgccagcataatcaataccgttccgtttgaaactaaaacgcgaaaacacatcttgccagagaaaaggagatgaaaaagatggcgagcagaaataaactcttagttccaggggctgagcaggcacttgaccaatttaaatacgaagtggctcaagaattcggcgtgaaccttagctctgatacagcagcacgcgcaaacggctctgtaggcggggaaatgacaaaacgtcttgtacagcaggctcaatcacaattaaacgggaaaaatcaataatgcagcttattcgccggggcttctcggcgaattttgatatttatcggcattctcctttccgtgccggtagccgttcggattccttcggtctgacgaatcttcatgatgccgataggattcccaatgttcattgcgatcatgattccagtaatgattgtaatacttttgcttaggctctttgtcatttccgttttcctgaggattttgtgttgggggctgctctgtttccccatcttgttccttctgtgtgttttcctctgatccggaagctgcatttttttcggtttgctgattgccgtcctgactgtccggcttcgcttcttccgtaccgggcgttgtttcattgtttcccggcttctctgctgccttttcttcatcaggagctgtcttttcatcagccgccggcttgtctgtgtccggctgctcgctttgatcagcgtctgtttcggtatctttttgatctgtttcattgccgtcggtttgcttttcaggctgtttttcttctgttttcttttcgtttcttcttatgtagctgcctgttgacatcccttcctgttttgctttttctcttgtttccatatcagattcaagcgattggacctggtaggtgcccttatatttttcagtcatgtcagccagctgttttttaacgccttttttatatgtattgtcatctgtattttcataaaccgtggaaattaaaatctcttttgattcctttacatatccatgcttgctgcaatcggtaataatattactgatgacttccttaaaatcgctgcttttccaatctccgatgtcactgatgacctgtttggcgtcatggttcagcggtgtcagttcaatgacttcatatttgctgtttaaagccatttcaatgctgggattaatgtcaagcgtcatatacgcgtaagctttgttatcagaaaaaaccgggagcaaaattaaaataaacaaaataatagcagtcatcgtaaacactcccaatttaaaagggcgcagtttcagaaaatcaaaaaagctggcccttcttcccatacgcgtttcgccttcgaacgtaatttcctctccgatttcacaagtgcggtgatcattttttgtttttaaaaattgtccgtcaggggttagcaacgtgacgaattttttatttttctctactatgatccctcttctcatgagtgcaacacccctttaagataatcttttaaataaatataatcaccggtaataataatactcatggcgatgatatattttcggttccgttcgatcgtttttctgctgaccgacacgagctgctccagctgtttgacaggaagctgttttttctggtgcaaaatggacgccagctcttcattttcaacaagcgtgtaggcaaccttaatcgcattctgcctcgcatctgtatgcttcggcgattgttccagcagctctttaaaagacaggccgtattctttcagctgcttctgaaaaaaaagaatttcttcccggcgctgttcctgttctatctgtttgcggtattcatcaatggaaagctccgcttcgataaggctctgcgaagattcctggtcgtcgccttcctgcacatccatattgatatgctgagcggttcttgcttcttttctgatatagtctatcacttttctttttataatcagctctgcaaatgcaagcagcgaattacctttttcagccgaatatttttcaatggcttcgttaaacgcgatcagcccgatgctgaattcgtcgtctttttcatctatatatcgtttacaaacggatgaaaccgtcttcgcgataaaaggcttatattgctgtattaaatcgttctgcagatctttgtcgcctttttgtattttttcaacagatgtttcaagcgtttgcttcttttttcccaatttaaacaaaaggctaagcactggtttcacctcagttcctccctataactactcataatcatagctaatttagtagggattcgcaaaggaagaaaaagagaaatcgatttcatttgtctcaattatgacaagccaataagacgtactatacatgatttcgtgcccccatgcagaattaagggggttttctctgtgttttttgtaacaatgctgttataaaattgttatcatatgtcttaaatgtaagcgtttcaaacaaaaaagggaacctgctttttaaaaagccagactccctttttgatcattttacgcgtgttctcttttttccgattccgcgccggactctatttgttttgctcctgacataaaccatccgcaaaccgcaatggcagccagaaccgcccagaaaatgattttccaggccgccgaatggatgatatctgccggaattataccgagttcctcatgggccaatgtataaagagcgagcttcacgcctacccatccgacaatcacaaatgccgccgtttcaaggcccggcctggttttcagtaaggatacgaacattgatgccgcaaaacgcataatgattaaaccaattacgccgccggctaaaataacgagaaactgaccgccgtccaagccgccgatggcaggaagctgagttcccgggagcgttacggcaagcgcgaccgccgctaaaatggaatcaacggcaaaagcgatgtccgcgagctccactttcaagacagtctgccaaaacccgctttctttctgcgttttctgaccggcgttatctttaaatacataccgcttcagcaaatggctgaccgcaatgtaaaacagatataaagcgccgacggcctggacctgccaaacattcaccagaaaagaaatggcgaacagcgacccgaaacgcaaaataaatgcgcccgccaatccgtaaaataaagccttcttcctttgtttttcaggaagatgcttcaccatcacagccatcaccagcgcgttatccgccgccaaaatcccttccagcccgattaaaacgagaagaacccatccatactccaataataatgcaaagtccaatccattccctccgtttcttttttctatcatccgagcttataccggcggttttttacgcaaaaaagacctttgccgatataaggcaaaggtcttgctagacatgaatgattggcatgccaacaaagccgatggatatgatccatgaattgacgactttgtttccggaatatccggacgctactcccctttgggatttcaagaaatatttgtttatacgctcatgataaagcctgtttcatcatttgtcaacgcttaacttttttaacaaattgagaaattttttctgttttggcccgctgttttcttctctttaaaaacatccaaagaatgagaagcaacacaatgaatataccgagcggcagcatatattgatcgagaatggaaccgacgcttttccaattttccccgagtttcattccgaggtatacgtaagcaaatgtaatcggcagcatcgctgcatatgtatatagagagaagacccagacattcatcttcgcaatgccgcacggcaaagaaatcagcgtcctgacccccggtataaaacggccgctgaacgcgaccaaacctccgtgcttctgaaagaaatcatctgatttctgcagggattcgggttttatccatatatactttccatatttcagcaaaaacggccgaccgcccagcctgccgattccatataagacaagcggacctgaaacaccgccgagcgaaccggcaaacacggtcccggcaagcgtcatatccccttttgagacccaatagcccgcaagcggaagaacaatttccgccgggatgaattctatactgagcgccaaaaaaattccggcataagataagcttttaaacgcctctattattgatatgatgaaatcttcgatgatctatcactcccggcttacgtctatattccgaaacttaagaatgattttaacacaaaaccttgaggctgaaatatcttttagacatgcccgttataaatgtgagtcgtttcagatcggtatagcgggagggaatgacatgcgcaatacaacgtcccgcctgtctcctgattgcttgtctggcggcgtttacatcacttaagatctcccgaaaagtaagcggcggctgaccgcggattcagttcatatgggagcgggaaattttctcagtcaccacatgggaatgcgtgggcatttcccggggaatgattttgtataatctttttgattaccgctgatgattttcagggacttcagcgctttaaagaacttaccgattcactgattgtaaataaagaattcatttccttttcagccgaccatttccgcctgaggaaatggaacagccgctccatgaagcgccgcaacacccataagttgctacacatggaacggacccgtttatccacaataaagacaaaaaggagtttttattcatgcacacgatgtggaagggttcgatcagtttcggcctcgtcaatatcccggtcaagctctttgcggccactgaagataaagatataaaattccgcagtcttcataaagaagaccatgcgccgattaaatacgagaaaatctgcaccggatgtgaaaaaagtctggaacctgatgaaatcgtgaaaggctatgagtatgtaaaagggaaatacgtcattatgacagacgaagacttgaaagacgtaaaacaggaacatgaagaaaaagcggttgagattgttgactttgtccagctgcaggaaattgatccgatttattttaaccggtcatattatgtcgggccgggagataacggcacaaaagcctatacacttctgcgggaagcgctgaggacgacgggtaaaatcgggattgcctccattacgatccgctctaaacagcagcttgcgattcttcgcgtgtatgacaactgcatcgtgatggaatccattcattatccggatgaagtcagaaatgccggacatgtgccgggcgttcccgagcagacagccgttaatgaaaaagagctgcagacggcgattacgttaattaatgagctgacaaccgagtttgacccggaacaatacgaagatacgtaccggaaagcccttctcgctaaaattaacgataagctcgaacatgaaaaagcgggcgtgacaccggctgctgccggcccgcgcgaagatgtcatcgatcttgtcagcgcgcttcaggcaagcattgaccggacgaagcggccggatcgcgaacaggctgcaccggcgcggacaaaagacgccgcgtcagcaggcggcggaggcaaaaagcagaagacgaccagacaaaaagccggaacgtcttaatcatggtgctgacgatgcagccgattttgacctctgtaccgcctgaaggcagtgagtggcgctatgaggtaaagtatgacggattccgctgtcttctccgcatagacgaaagcggcgttacattaaccagcagaaacggacagacgctgacgaatcaatttccggaaatcacggcttttgcggctcggtgttttcagcacatgaaagacaggttccccattacgcttgacggagagcttgtctatttaatcaatccgtacagagcggactttgagcatcttcaaatccgcggacgtttaaaacggacggaagcaattgaaagcaccgctgatagacggccgtgccgctttctggcatttgatctcctcgttctggaaggcgccggcaccgtctcattaccgtatgtgaaacggaaacgcgccctttccaaactgcttaaagaagcaaatcttcccgcctgccctcatcacttagcggaagaagcgattcaatacattccggaacacactgactttgatgcgctttgggacaaggtcgtccgccatgacggagaaggtatcgtagcaaaaagggcttccagcggctgggcggaaaataaacggtctcccgactggcaaaagtataaacatatgaaaacggcacatgtgctattaaccgggtttaatccgaagaacgggtatataacggcctctgttttaaaagacggcaccgccgtcccgatcgcttccgtttcccacggcatgcaggcggaagaaaaaaacgccgtcagaaccattatggagacccacggaaaaaaacaaaaaagcggcgagtatacacttgagccttctatctgcatgaccgtgcagtatttaaccatattgcaggacacgctgcgtgaagtatcttttgtgtcttttcagtttgaaatggattggacggaatgcacgtatcagcagcttatccttcactctaaaacgctgccgccgaagctgcagttcacaagcctggataagattgtttttaaaaaacgtgaaaaaacgaaagcagatttccttagttatatggtgaaaatgagcgattttcttatgccctttcttaaagatcgggccgtcacggtgatccgttatccgcacggcgcgcctggcgaatctttttttcaaaaaaacaaaccggactacacgccggactttgtctcaagcgtgtttgacgggagccacgagcacatcgtatgcagcagcataccgtcacttctatggctggccaatcagctggcgcttgaatttcacgttccgtttcagacagtgcattctgaaaggcccgcagaaatcgtcattgatcttgatcctccgtcaaggaatgattttcctatggcagtggaggctgcgcatgtgctgaaacagctgtttgactcattaagcattacgtcattcccgaagctctccggaaataaaggcattcagctctacatcccgctttcaccggaagcattcacctatgaagaaacccgtgcgttcacaatgctcatcgccgattattgcgtcaggacgcggccggatctttttacgacagagcggtttatcaaaaaccgaaacggcaggctctacctagattacttgcagcatgccgaagggaaaaccattatcgccccctattcgacccggggcaacgaattgggaacggttgcggctcccctttattggagtgaagtcaactcctctttaacacctgatgattatacgatcgatacagtagtgaaccgcgtcaggacagagggagatccgttttatgatttttaccggaatccgcaggacggcccgctttcaatcgtgcttgagcaaatcaagagaaagagctgacgctttttgtcagctcttttcagtctgatacgtgcacatcaatttttctttggaaataaataaatagcaggagtaaggaatgtttttgagggtgagctgttttgcagtaaagtataaaatcggaatatgggccgctttcttaaacagcctgtagcagccgctggacggttttatcacatcaaaaccgagtctcgcagctcctttatgaagcattgtaatgccgacgactcccttaatctcgtctttccgtttatgctggttaatataatccgctaaatgaggcatggattgatataccttctgatatagcataatcccccttctgaccgcgctttcaataggctgcagctctttcaggagtttgacattatgaagatgaatcttaactaacacgtcgttttttttaattctggttccgtcgctcaggatgacttcttttcctttatatctagtcaaacggacgcggaatacattcgattgccgtttatcaatcagcgtcagccgggtaaagaagaaataaagcggatcaagtaagtaccatatagacagcagacagcttctcacatgttcaccttctttatattcaaagcaccctcatattttggcatggggcatgtcacattatgattggtaaataatgatgccgacctgtatcagcttatgcaaaaaccgcttcaggctctactgtccggaacagaaaaaaacactcttcgtgaagaagagtgtctgtatccgctttcttttaacggaaaagcaaatgctggctgtgaattcccgcttttttcagtaaggctatcagctgttcctgttcctcaggcataagtcctgaaaacgctctcgcaattctcaatgaatgaatcggataaattttatccaaatactcgtttcctttatcagttaaatgggcgtaaacagaccgtttgtccttagggtcttgttctctgaccaaaaacccgtttctttcaagcttgtcgatgacataggtgacattcccgctgacaagcaaaagacgcgacccgatttgctgaagcttttgcggacctctcgtatagagcagctccaaaacggcaaattcagtcggattaaaaccatgttctttactgtcgcggatgctgtgttcagacacacttttgaaagcccttgcaaaaactttgtacaaattcatcgaacgcatcacttcttcttcgttaaatgataatctcatcatatctaccccgtatttaagatttttataaaaaaataatgtaaacccttacaattcataagagtcgttctttgttttatattctattcgtgccgtttttcagaattccttcttttttatataaaaaaatacccttatacatcatttaatttgtataagggttccgttctttatagggaatgttccgaaaaaaatacgcgtattcctttctcagctccgtaattgtcatggaattgagtatttctttcgtatagactccgatctgcagaagctttttggaataatggtttctctctttgtccaatgcattttgaagcaaacgactcatagcggcctcctttgttttccgttattctatgatcagaataacgcttttatatcaaagacgtataaagccattgtaaaacttctgtagattatgatgtttttcggtaaagtccgttctggacggctctgagcagcggaaaagcgtgttccccggcaagctgcatgaacgcctccagcatttcatcgcgtttcatatctaattcaatgatttcttttgccagcgaaaccgctttttctttctccattcctatccttcctcctcattgtgtctgtacagtaagcataaaacggggcacagaaccatgcattaaccttgtcaatttttctgccgctttttttctaaaattttctattccgcgtcagaaaacctgacaagcgtcaggttttttctctttttttcttatataatatgagtaaaagacatccaggggtggaaaaatgacgacagacgaacaatcttacaaagataaaaaagtaatctcgatcggcattgtaagcgaattaaccggattgtcagtcagacagatcagatactatgaagaacggaaattaatctatccgcagcgttcatcacggggaacgagaaagtattccttcgcggacgttgagcggctgatggatattgccaacaagcgggaagacggcgtgcagacggctgaaattttaaaagacatgcgaaaaaaagaacaggctctcaaaaacgacccgcagctccgcaaaaaaatgctggaaggacagcttaatgctcattttaagtataaaaaccgctgatcaaaaaagtccgcctcctgtgagacggactttttttataaagcatgaagaaatgcagttgcaatgccgaaataaattaataaggacaaaatatcgttcagcgtcgtaatcagcggtcctgatgcaatcgccgggtcaatgttcagtttatgaagaataatagggacgatcgttccggccatcgtaccgataatcaacgttgcaagcagcgatgaaccgacgacaaaaccgagcgttaagtctttctgccagacggttgcgacaatcgtaatcgcgatcgcacagacgatgccgatatagataccggttcttaattcacggaaaatcagtttaaagatggtttttttattcatttcttctttagccagtcctctgatgacgacggcgagtgactgtgtgcctgtattacccgtcgttcccgcaatcatcggcatgaaaaacgcgagggcgacgactttttgcaatgtatcttcaaaataattcagaatgcttccggaaatcaatccgataaacaaaagcagaatgagccacggcaaacggcggtacgccgcaacgtacgctttcgtatcaaatgtaatcgccttaccggaggctgcgaatttttcgtaatcttcatcggcttctttaatcacgacgtcaataatatcatcgacagtgacaataccgacaagcacatgattttcttccacgatcggaatggctaaaaagtcataccgctggatcagccgggcgacttcttcctggtcttggagcaccccggccgagatgacacgcgtaaacatgagatcctgcactttatcctcaggctcgccgagaattaaatctctgtaagagagcactccgacaagctgcttgctgtcattaattacgtacaaataatttattgattctgcgatttctgcaaagcttttcagcttcacaaccgcatcttttactgtataatgctgcggaatccagacgaagcggttcgtcatcatccgtcccgccgattcttgcggatagttcatcaaaagctgcacggcctttgattcctcagcctccatgctggataaaagctgttctttcagttcttcatccatctcttccagcaatgcggcgagatcgtcgttatccattttattcattgcgagagtggctttcgttttaccgactttatgcaaaacggcaagctgaaattcccgctccagctctccgatcatgtcggtgatgtcatcaaccgtcatatatgacagatagcgggcccggtgcttttccggcatttctttaaacaaaaatgccatgtcatagggctgaagctcatctatcatgtttcggaattcttttatttttccgtcccgcaataaaatgataatgcgtaatatgagttcgtcataggtcatgttttggaccatcgggactcgtacctcctttacggagacgcgccgtccgtcaagggaagtgcggcggtttgtctcctcatcatgtcgtcactggttatctggctgtatatgggtacttcttctgacatactcgaatggggagaatccatactccgcacctccttatcatgctcagtcgtgtacgttttgaggcataaaaaaaaccttctgatatgaaggcgaaaacaagcacggcaaataaacgtgcggggcctccaatcgtagagctttagcactgtatggcataggacagccatccagctgcgttaagaatcaccttatgtcgatgattcctgttgacccattggcgtctttggacatttttgggcagcagcgtatctccatacaggagcctcacctaacgaagttcttatttgaattgacacactgagattacagaaaaaaaaggaatgtgtcaaccttaaatttgtgatttcagcacatgcctataaaataaacggaataaaggcataaagcccttattccggcaaatcgctttcatcctcttctgaaaggaaatgataggattcatgcagcatgagcgcgtactccccttcttttgtcggatgcggtacatactcagcctcgttgatatactgctcttcccttttcttcatatgacagacctcctgttcaattttagattgtccaaaagaagatccgttatcataggaaaaaaaattacttgcggagcgggacatgcagctatatttttcggatcgtgaaaaagttcctaagcagccacgggcccggtttgaaaccgagcgttaattgccacgcgccgatcgcctgcagtccgaactcccgaacgagaaccattttttcactcatgctccgcacatcctcaaaccacacttcatgcgttcttccattttcatcagtataccggaagtaaggggaacgctcctgctgggaataacggatcactgattgatgcttcatggccgtttccatggcgcgctgattggagatggcggatccgatcgttcccggacggtacggaatcacccaatcatacccgtatagcggaacaccgagaatcacttttcttctcggcaccctgctgatggcaaaattgatcgtttgcctgacctctgtcaaaggcgccacgggtcccggctcactgccggcgtggtgccagtcgtacgccataatgaacatataatcgacgacggctccgattccgccgtaatcatatcccctcagccacggcactgcatcacttgttttcgccggaaccgatatcgttaacgcgagctgatgctctgaaagccgggtttttaactgccggagaaatcctgtgaagaggtccctgtcagcttctctgacccgttcaaaatcaatatttacaccgccgtatccctttcttacggttaaggagacgatattgttgacgagattcgttcttgccgtcggattttgcagcacttgatgggctaattccggactgaatcccccttctgtcagattcgtaatgacggcaagcgggcgcactctgttctgccatgtggtttctattgcggttctgtcgtttaaatcgttaatgatatctccgttcgggccaaaatgatattcaaacaaagaaatcgccgaagaatacggcgcaaaatcattaattagctctctatccgcttcaggcgtccgaatgacataaaattgcagggttcccgcaagatagttagagatatcagggatcttcactttcatacccgcccgcagccggttcggcggaatatccgggtttgcctgcatcagctgcatctgcggcacataagccttacctgcgataacggcatacgtatcattcggctgaaccgtatattcattaagagggattaaaagcgcctgccccggaacgatattcgtttcctcaagcccattgacgcttctgatgctgtcaacagggtatccgtactttctgctgatggaaaataacgagtcaccagactgcactgtatgaacaaacatagatgtcctccgtttccttttgatcaaaagggctctacttatctttatgaatgatcatccggtccgattccaaactctgtttgaagaaaggctgtttacaaatcagacatgatcaactatgatgatgtcatcataaaaaactgtataggaaacgcactaggggtgctgttatcggctgagataaaacatgcggcaggcatgttttgatcccttataacccgatctggataataccagcgtggggaagtgcagattgaccggagcgcagggtttttccccatgcgttttcgttctgctgctgcatattccctcggatatgcagttttttatttttcattaaaaaacgggggaggacaccgcaatatgaaactgaatatgaaccgcctgtaaaatcatctctttcatacatacgactatccgataagaaagcaggagatcacaatgaaaaattggaaaatgagagaaattgtcgtcatgtccgtcatcagtgttgtatttgctgtcatttatttagtatcaactcatgcaagcaatatagcggcaggatttttcggccggatgagctacgaaccgatttacggtatctggtttatcgtctcggtgattgccgcgtacattattcaaaaaccgggagcggctctcgtttctgaaatcatcgccgcgtttgtggagtgcttactcggaaatccgtcaggaccgatggtgattctgatcgggatcgcacagggaatcggtgcggaagcggtcttttttgcgacacgctggcggatgtataccctgcccgtgcttcttttatccggtatgggttcttctgtgacgagcttcatttatgacttgttcgtttccggatactctgttttgaatccgggtttattagccgtcatgcttctcatccgtctggtctcaggtgcgcttcttgccggccttctcggcaaagcaatcagtgatgcgctggcttacacaggggtgctgaacggcatggcgctcggaaaacaattcaagaagaaaaagaaacaggtgaaccaagatgcaggcatctgagccccttctatcggccggccgtcttaccttttcttatgatcaggatgaaaagccgattcttcaaaacgtgtcctttcagctccgcaaaggagagcgggctttattgctcgggccgagcggatgcggcaaaagctcgctcgctctctgtttaaacggtctgtacccggaagcatgcgatggggttcaatcgggaaccgtttctttatacggaacacctctttcacatctgacagagcccgccgccagatccatcggcgtcgtgtttcaagatccggaccagcagttttgcatgctgacggttgaagatgaaatcgccttcggcctggaaaatttgcaatatacaaaagaagatatggacgcaatcatcgatgatgttttggcaaaattggagatcactcatctgaaaatgcgaacgatcgcttcgctgtcaggcggttcaaaacaaaaagtggcgcttgcctgtatcattgcgatggaaccggaactcattattttggacgaaccgacggcacagcttgatccatattccgcacgtgaattagtgcggctgatcaaagatcttcaagcaaaaaaaggcttcggccttctcgttatcgaacatcagcttgatcattgggctccgtggatggacaggacgattgtccttgacgaaacgggtcagaaggtgatggacggagagacggacgttatctttgaaacaaagattgaagagctgatgcagctcggcattccgattccgcgtgtgatctcattgcaggagcacgtcagcattccttttacattgtgtaaagaaaagctgtttcaagaatctgtaccgtctctgcccgaaccccggcccgccgcgctttcggcagaagacgcgctgagcgttcacgggctgtcattctcaagaggagcagacgtcatttttcaggatgtgagcttttccgtaaaaaaaggttcaatcaccgcgattgccggccctaacggaacaggaaaaacaacgctcctttctgccgcggccaagctcatccgtccgctgggcggagacatcaaaatagacggcagaccgattgattcctattctgaaaaagagctgcggcggctgatcggatatgttttccaaaatcctgaacaccagtttgtcacagattccgtcattcaagagctgatgttcggctttgaaagcagcagagccgcaaaggagaaagctcttcagctgttaacccgattcggcctgagacgccatgcctcacagcatccgttttctttaagccaaggacaaaaacgccggctcagcgtcgcaacgatgcttatgcacaatgtgaacgttttgatgcttgatgaaccgactttcggacaggatgccaaaacggcgcgggagtgtatgcaaatgctccgtgagattcaaaaggaaggaacggctgttttgatggtgacacacgatatggaactcgtctcagattatgccgacacgatccttgtgctctgcggcacgaaactggtattccgtggaactcccgacgctttgttttctgataacaccgggatcgccgagcaggcgcatttggctttgccgctgcggtatgaatggatgagacacgacaggaggcggagaaatgaacttgcggctggaggctgttaacccgtcaataaaggcggcggctgtattgttatgcgtcattatgctgtcgtttatttataatccgtacacccctgctttgttttatatcatcattgcgggaggcgtcctctcggcggggcgtgtgccgctgaaaaaatggctgctgttcacgattccgtttgtcattctggccttcggttctttatggacagccgccgtattcggaaacgtcccgacaaccggaagcaacctgctgtttaagctcgggccgattgccgtcaacagtgataacgcggcgctcgggatttctatcgcgtttcgtattttatgtttttccgctttgtcgatgatgtttcttttcacaaccgatccgattctgttcatgctcagtctgattcagcagtgtaagctgccgcccaagcttgcatacggcgttatcgcggggttccggtttctccctcttctgaaagatgaaatcctgatcatccggcaggcgcacagaatcaggggcgcggggtctgattccgggctgaaaggaaagctctccgccttcaggcgcttcaccattccgctattggcaggcgcaatcagaaaggcggaacgcacggcgatcgcgatggaatctaaaggctttacggggagccgaaaccgcacgttttacagaactgttaccgtgcgccgcgccgactggtgctttttcctgctcgtgcttctgttattcggcgcaagctggctcatttcattgttgtttgtataaaaacaggccgccggagtgattcggcagcctgttttgttatgtatgttattgatgataattgagagcctgagcgagattggacttgatcgtaatatctgagaaattaatgccgagctgtacggcggtttgagcgatttccggcctgattccggataaagtggacgtgacgccgatcaatttcagcgcctcaactaatttaaaaatctgatgcgccaccatcgtatcgacaaccactacacccgacaggtcaattaacagatgttcaatcagccgttttgcacatgtgctcagcgtattttcaagaatgaatttggcgcgctccgtgtcaatatcgccgacaagcggcagcagcgccgtccgtttgctcagcgtgataaccggcgagcttaactccaaaatcatttctctttgcgcattcagctgcatttttgagttatgctcggcatgatcgacaaacgtgtaaatcgtaaaatcaaatacttgtacaattaaattctcccatttcttcctttctccctgtgcaaacgaagattcatgtttatcggcaaacgcatcgtaataactgatgtatagtctccggtttctcatgaattcacggaccacatactgtacgggagtatccagatgcttctggtctttcgcaagctcaatcacccactgctcgaactcttctaaaaattcttttttcggcatgatatacattttattaatatgccggtaaaattctttatcctgctccgtcagttcttctgtgatgacgggatttgtcaaagaataaatcgaattcggatccgaatcttccatcgtttcgatccactctttcgcaatttgatccacttgttctgaaaaatagttgtataatgcttcacttatcttcatatctcttctcctttcccatttccaattataccgtcagcggatcatgaatgaaaataaaagctgttaaactatccatttatttgaaattttttagtgcgatagattacgccttttttatgaaaatgcttcaaatgactctttccggccggcatgctctgccataaaatagtagcaacacccttgtatccactcgcaagcataaaaaaggagggcttttttatgaatggtgaaatgcatttgattccttatgtcacggatgaacagatcatggaggtaaacgagcttccagagggtattaaagtgattaaggcgccagagttgtgggcaaaagggtttaaaggcaaggatattaaaatcgcggtgcttgacacaggctgcgacatcaatcatcctgatttgaaagaccggattgtcggcgggaaaaacttcaccgatgatgacgaaggcaaagaagacgcgatttccgattataacggacacgggacacacgtttccggaacgattgccgccaatgattcaaacggcggaatttcgggtgtcgcgccggaagcaagccttttaatcgttaaagttctcggcggtcaaaacggcagcggcaaatacgaatggatcattaacggcatcaactacgccgttgaacaaaaggccgatatcatttccatgtcactcggcgggccaagcgatgtgccagaattgaaagaagccgtcgcaaatgcggtaaaaagcggtgttctggtcgtttgcgcggcaggaaacgaaggcgacggagacgagcgtacagaggaactgtcgtatccggccgcttacaacgaagtgatcgcagtcggatcagtctcaatcgcccgtaaatcgtctgaattttcaaacgccaacaaagagattgacctggtggctccgggagaaaatattctctccacccttcccaaccataaatacgggaagctgacgggcacttcaatggccgccccgcatgtgagcggagcgcttgccttaataaaagggcttgaacaggacgcgtttcagcggacgctttctgaggctgaagtctacgcccagctcgtgcggcggacccttcctttggacatcgccaaaacattggccgggaacggatttctgtatttagacgcgcctgaagtactgatggaaagagccgaacaggcacagctgctgtctttctgatatttttctcatataatgattgatcagcttgtcatatcaccaatttttaaaatgtgagattttctattgacagtggtctgaataagctgataagataaccaacaaatgatgtaacttttcaaaaaaatttaaatattttctcttatcgagagttgggcgagggattggccttttgaccccaacagcaaccgaccgtaattccattgtgaaatggggcgcgtgatttttgcgccgagacgactgtctcataaggcacggtgctaattccatcagacgtgatctgagagataagagaggcttgcattttgaagttaaagcctctttctctcatgagaaagaggcttttttgttacatctcacttaaaggaggaaacttaatgacaacaatcaaaacttcgaacctcggttttccgagaatcggcttgaacagagaatggaaaaaagcgcttgaggcttattggaaaggaaacactgacaaagaaacgtttcttaaagaacttgacggtttattcttatcagctgtcaaaacacagcttgaccaacatatcgatatcgtgccggtctctgatttcacccattatgaccatgtgcttgataccgccgtcagctttaactggattccggaaagattccgcagcatcacggatcccgttgatacatactttgcgattgcccgcggtgtaaaagacgccgtttccagtgaaatgacgaaatggtttaataccaactaccattacatcgttcctgaatatgacgaaagcattgaattccgtctgacgagaaacaaacagcttgacgactaccgccggatcaaagaagaattcggagcggaaacaaaacctgtcatcgtcggtccgtacacattcgtcacacttgcgaaaggatacgaagaatcagaagcgaaagcgattcaaaagcgccttgttcctctttatgttcagctgctgaaagaacttgaagctgaaggcgtaaaatgggttcagatcgatgagccggcccttgtgacagcttcttctgaagacgtccgtgccgcaaaagaactctatgaagcgatcacaaaagagctttcaggactgaatgtcctcctgcagacatacttcgattcggttgatgcatatgaagaactcgtttcttatcctgtacagggaatcgggcttgacttcgtacatgataaaggcagaaaccttgagcagctgaaaaagcacggcttcccgaaagataaagtgctggcagccggtgtggtcgacggccgaaacatttggaaaatcgatgttgaagaacgccttgatgcagctctggatatcctcagccacgctgatgttgaggagttatggattcagccttcaagcagccttctgcacgtgccggtggcgaaacaccctgacgagcatcttgaaaaggatttgctgaacggcctgtcatacgctaaagaaaaactggcggaactcggcgtcttaaaagaagggcttctgtccggcaaagcggccgtcagtgagcagatcgaagaatcaaaaacggcacttaaggctttaaaagcattcgcaacaggagcgaactcagctcaaaaagaagagctgaatcagctgacggaaaaagatttctcccggccggcaagctttgaagaacgattggcgctgcagaatgaatcactcggtcttccccttctgccgacgacgacaatcggaagcttccctcaatctgccgaggtgcggagcgcacggcaaaaatggcggaaaaaagattggacggatgaacagtaccaagcctttattaatgcggaaacgaagcgctgggttgacattcaggaagaaatcggcttagacgtgctcgttcacggagaattcgagcggacggacatggtcgaatacttcggtgaaaaactggccggattcgcctttacgaaatatgcatgggtgcagtcttacggttcacgctgcgtacgtccgcctgtcattttcggagatgtcgaatttatcgaaccgatgacggtaaaagatacggtctacgcccaatcgctgacggaaaaacacatgaaaggcatgctgacgggacctgtcaccatcttaaactggtcattcccgcgtgtggatatttcaagaaaagaaatcgccttccagatcgggcttgccctcagaaaagaagtaaaagcgcttgaagatgccggtattcagattatccaagtagatgaacccgcgctccgcgaaggactgccgttaaaaacgcaggattgggatgaatatttaacttgggccgcagaagcattccggttaacgacgtcttctgtgcaaaatgagacgcagattcatacgcatatgtgttacagcaactttgaagatatcgtagatacgatcaatgatcttgacgcggatgtcattacaatcgaacacagcagaagccacggaggatttttagaatacttgaaagaacatccttacgtgaaaggcctcggactcggtgtatacgacattcacagcccgcgtgtgccggcaactgaagaaatctatcaaattattgatgacgcgcttgaagtgtgtccgactgaccgcttctgggtaaacccggactgcggactgaaaacaagacagcaggaagaaaccgttgcggcattaaaaaatatggtcgacgccgcgaaacaggcacgaaaaaaacaagctcagcttgtataaaaaaacagccatccgcaaatcgcgggtggctgttttttctgggcgtgctatttattcttcagcgccttcgcaagttcacttagtgaatcatgctgcttaatttgatagccccgcccttctttttgcaaataccctttttggcagaattgcgtcagcacatgcaagagatgacggtaagatacacccaaataatcacagaccgttacgtgcttctctttataaacccctttataagccgtctgcaaaataaaatcagcaagccggttttcaagcgggaacgccagactttgtgaatatttcgaagccataagcgttgccttagcacttaaaaacttagccagctcacgcaggaatttcgcatcctgcagcaattgcgcgcggcagcggtaaataggcagagcaaaacaaacagtcttcgctgaggcttgaattccttttgtgtaatacacttcatgtaatagttccatctctccgatgtaatcatttttgttgataaaattaattaaagaaactttcccgttttggtgggttacatatattttcgcttttccttcaatcacgtaaaacaggaagtcaggcctcctgccctcttgaataatccattcgtcccgctcatattcgcgcacttccataaactcttcagcggggaaagagaataaatgcgcgattgagtgtttttctaactgatgccgctttttctcgcctttataaacttccatcgtccaccccaaaaatatgagatatctcatattgtctttatgtctttacatgataacatgccaattaaaggaggaacgggaatgaaagcatatcgctggatgagtctgcatttttttagtttttttatgacatggggtgtttttctgccctattggacgggatggatggtgcatataaaaggggtttccgtatccgaagccagtttcattatgagcctgggcttggcggcaagagggatttccacattatttttcttcccttatttatcaggaaaattcagcagcaaagccttattaaacggcgccagaaccgggacgcttctcgcacttttatgttatattcccgctgattcttttcaaagcctgcttcttgtcacattagtgctgcatgtgttttaccctgctttaatgcctgctttagacagcgcttgcggcgtccttgtacagcataacgaattaaaggcctatgggacaagccgacagtgggggtccgcgggttttgtttcagccggcgtcatcctgtccgtctttacaggtatattcggagatcaagcgattttatgggcactgcttttgggcaccctgatattcgcatgcctcagctttatgcatgcgccagctgttctttcaaaacggccggaaacagaccgcgcaagaaaagagggcatgtttgctttattccgcatcaaatatttcggtctggtgctcgcaatcgttatcttactgcaggcggcacacgcgtcttattacaattacggttatctctttttgcaggaaatcgatgcccccgcatatgccatcggaatcattatcaacatcgccgttatcgcggagattatcttctttgcaatcgctgaccgatactttcatcaatttacggcaggctctttgctcgccttggcggcgcttggtgctaccgtacgctggatactcgtatttgcatttccgcatgtcatcattttctgtattgcgcagacgctgcatgcctgttcattcgcgatgggacactatgcatttatgaaatacttaattaaaaatatttcacccgcgcaaatcccgaaagtccaaggcatatattcagcgcttgctctcagctggagcactgcggtatttactattttcggaggttttttatatgaaattgaaccccggtatgcctttatcggaatgattgtttgtacgatcccatccatgcttctcgcccttttatacagaaaacttgaaatgaaaaagagagtttttgcaggaaacgcacaagatatatagccatcgctttatagacgatcacatgtcccgctgtcattttgaccgatttgcgaatgctgtgcgatgtattttctctatatttaaagtatttccttcatatatgatgaaatcaaaaacagcggtataacccgctcaattggttaatgaagggaatccattcagaaacttggacagaatcagtgaatatactgatacagtactgcttacgctcatttcggggaactttgttcgtaataaaatgattttcagccaactcataaggagggacattgtgtcacagcctaatttgcccaatatcacccctgtcgttacactttccagagacgataccattaaccttcttctttcgtcaattgctatggaagagctgggaatggcacatattctgaatgcggaaggggaaaaaatccaatacgcgctcggaacgattcccggattaacagggcccccgtcaagtcttgcggatattcttaacctgaatgagagcgtccgggatacgcttgacagcttaatgaaacaggagcttcttctcggttcaaaattggacagtatctcaaatatccctacactggcgggaccgactggtgctacggggccgacgggaccgacgggagcagtcggaccggccggagcgacggggccaaccggatcgatcggacctacgggggtcaccggtgcgggccttcaagggattgttgcttttaatccgctgattgcccccacttacacaaccggacaggttgtcttgtataacggaagctcttacgtcgcaaacgtaaacagcccggcgggaacccctggagcctcagctgactatacacttttagctgcggcgggaagcaccggtgctactggcggtaccgggccgaccggaagcaccggcgttactggcgacaccggaccgactggaagcactggcgctactggcggcaccggaccgaccggaatcaccggaacaagtctgacagcaacttccggctatgcgagcaatacgggcggcggtgttgtcgcagttattgtcggcggcacgaccatttccttaccgaatgaacaaaacctttcggcagatattacggctaatgccgcaaataccatatttaccgttgctccggcaggacggtactatatttcctaccatattaatttaacggccggcttgcttgtaagttcgcgtattttaatcaacggcactcctcctgcaagttcgattatcgccccggtcgcgtctttggcaaactttaataactcctttattgtgactttgccagcaggcagcaccatccagcttcagctgttcggattattgggtgcggccacattgcttggaggaagcgtcggtgcagctttaaacattattcgattatcttaatggaacatgcaaaaaaaggatcaggcgtttgtccgctgatccttttttaattgagacagaagttctttcgcgggtttaaattgaggattgaacttcacggattttttggcgtaagcgatggccgtcatatcatggtttaatgcagcatggcatttcgccatataataaaaggctctgaaatcggcggcaccttttaaaatgaagtgatcagcattttctccttcaacctgcgttccgttttcaaatgctttgattgccgctctgtacttttccaaatgatataatacaaggcctttataataatgaagattgctgtaatcaggatatagcttgagcactttttcaatcccttgttcggcttcttcataccgtttgagctcaagcaatattgtatatttcaaataatacaggagagacggaggcattcgtttttcgcttaaaaattgaaaaattgagccgttgacaagatgtaatgctttttcatagtctttgattctgtagcattcacttgccaaatgatagacaagccacggatcaggattttcctctgaaagctcttcatttaaaatgctgatattccgtttatgtttttgcttgatcttttcttcctgctccaagtagccgtagtgatgaatcacacatgggagcgtgaaaaaagcattgttttcttcctcattggaagccgagatattctcgtgaattctgccttgatacagaaggcctttatgattgcggaacagtctcggctgcatgctttcaaacgcttcgttttcatcgagctgcttccccgtataattgatgattttcaaaaggccccggctcggtaatccgtcatgaagcagcgaagttaaaaaacggcccgtctcctgatcgagctcttcatccgcgtcaagcactaaaatccaatctccttcggcatgctgcagggcgtaatttctggcctttgcgaaatcattctcccattcgaaatcaaacactcttgcctgaaagcttttgcatatatcttttgtattatcttgtgatccggtgtctgcgatgacgatctcatcagcgatgtcttgtacacttgataaacaacgggagatgtatctctcctcgtttttcacaatcatgcaaagagtcagtttacattcagcatttccgctcattttctcacctttcccgattttggagttgttgattgaaccaaggccgttcaggagtgccgttcatcgtgatgatgacaggccgcacccatctgacggcaggttcggcagtttccgtattccattcctgaagctgcctgacagcccgcttcgtaatcggatgcgcccggaattcgcgcgggctttcagaaatgaattttttcgttcgttccgtaactgtcttcatttcaagaaagtgccgctcatacatctgcttctgctcttcttccaagctgatcattaaaaacagacggccgcctgtttccatctgccagcggcacaatgcggagaacagcctgatttcttctttgtaatttgaaccccttcttttatccacggtcacagataatatatgtaacagcgccatcgtgagacaatgcatggcttcaaaagatgcgtgtttcgcttttgagatgcttggatacggcatatgcttcacccgtctctttttttatgaacgctccccgccttttttcttccaaccgcagtcctcacaatccccacactcacagcagccaatgcggccgtaaaacaggccgtcacacggatcttccggatcactgggatcgtctggattccacgggtcatcaggatcgcccggatcactcggattgctcgggtcgtccggattccacgggtcatcaggatcgcccggatcactcggattgctcgggtcgtccggattccacgggtcatcaggatcgcccggatcactcggattgcttgggtcgtccgggtccatacagacttcagaatcctgtaagaagataatgtcctcaagcttcgtctgcaaaaggagttgtgatttcatgacggtgcgcaggagccgttcagtgcttctattaattgatgacaattcctccaaggagggatcgccggaagcgccgagaaacatttgaatcctttccgcttccgcctgcagaatatgggatagtccgatttcttccatagccacggatgaaagaaggaggttcagggtctcacatctggagagtgtaatgtcgggggtgatgttcggtatgtttggaagagacatcgatttctccctcttttctcttggtgtcattatgcaaaagtgctatatcgtattcttattccgggagagaagagatcattactgatgttttcgttaataaaatatcccggatataaaatccgggatattcgttcgttgatttattttaattcaagtttgacgtctacatttcctcttgttgcttttgaatacggacagaactcgtgagcggcgtgcactagcttctccgccgtttctttgtcaagatcttttgtatcaatgacgagcgttacgccgattttgtaacctccgtcactctcatcttttaaaaggctgacctgtccttcaatttcagaggtcatgtcgattttttgtttttgggcggcgagctcaagcgctcccccgaagcaggcagcatatcctgccgcaaagagctgttcagggtttgtgccggtttctccgtctttttttgcattcggcatgatgatgtcaaaatccagcaccccgtcttcggatttaatatgtcctgctcgtccgccgactgcggtcgcttttgaagtaaataatgccattattatcagcctcctcattgtacttactgtatatattgcccctgctcatatttttaaacatgattggaataggaaatgggccgtttttcggctacaataggggtaacgttaacaaacaaagagttggtgaaagaagtaatggcagaaaaagattttgaacatatgaaactggagaatcagctttgttttttgctgtacgcaagctcaagggaaatgacgaaacggtacaaaccgctgcttgataagctcaacgtaacttatccccaatatttggcgctgcttttattatgggagcacgaagaactgaatgtgaaacggatgggtgagcttttgtacctggattccggaacgctgacaccgatgctgaaacggatggagcagcacggaatcatcatgagaaagcggtcggctgaagacgagcgatccgtgacgatcagactcacagatgaaggacgggccttgcagaaaacagcggcggatattcccattgccatgctggaacagacgggacggtcaaaagaggaattaaagcagttaaagcagtcgctttatgaggttttgaatacgctgcacggcaaaaaataaggatgccccgaatgggcatccttatttttattctgctgccagaagcttcacttcaatatttcccgctgtcgcttttgaatacggacagacaccgtgcgctttttggataagggcttcaagctcctgtttatcaatgccggatgctttgacctcaagcgtaacgcctagtttatatccttggtctgcttcatctttcagcagactgacatgcgcagtgacctctgtttcaatactcagacgctcttttctcgctacgagctgaagagcgctgtcaaagcaggctgaatatcctgcggcaaacagctgttcagggtttgtagcatgttcgagcttttttgctcttggcgttcccggcatggcaacatcaagattcagcactccgtcagaagacgtgactttcccttcacgtccgccggcggctgatacggttgcagtaaataatggttttgtcatgtgaattcacctctgttatattgtgtacaatttaattttacacaatataatagagaccgtcaatctttccgcataaaaaaagcctaccctttttgaaggataagcttaaaagattatacgcggatttgtccgtttcctttgatgatgatttttgtagatgttaacgccggaagccccatcggccctctcgcgtgaagcttttgcgtgctgatgccgatttcggctccgtatccgaattcaaaaccgtccgtaaaccgggttgaagcattatgatacacggcggcggcgtcaacggcggtctggaagtaagccgcatgctcggcgttctccgtcagaatggcttctgaatggtttgtgccgtactgctgaatgtggcggaccgcctcctgtacgtcctgcaccgttttcacactgagaatcggcgccagatactccgctccccaatcggcttcttctgcttgtttcgcttgaggctccagtctgcaaatcacctggtctcctcggagctccacccctttttctgtcagctgattcagcagctttcgtccgtgttcttcggcccatttttcatgaatcaaaagagattcaatcgcgttgcagaccgaaggacgctgtgttttggcattgatgacgacctcgcttgccatttgaggatctgctgactcatctatgtacacgtggcaattgcccgctccggtttctaaaacgggtacggttgattccctgaccacaagatcaattaaatttttaccgccgcgcgggatcaatacatccagcccgtcatttaatgtaaagagctgtttggcggtttctttgcttgtatcttctatgagctgaacggcatcaatcggaagctttgacagccccagtgcgcgtttcatcacactgacaagcgctatgttgctgtggatggcggaagaacttcctctgagcacaaccgcgtttccggttttcaggcagagtgtggccgcgtctacggtaacgttcggtctggcctcatagatcatgcccactactccaaggggcacgcggattttttcaatggataatccattctctttttgaatggtctccagcgattcaccgacgggatcttcaagaccgatcagcagttccacggcgtccgcgatatcgagcaggcgtttttcatcaagagtcagcctgtcaataatgtcaggtgtcagtcctctgttccgtcccgcttcaatatctttctgattctctgttaaaatcagccggcgttcatttctgagtccgtctgcaatacattggagcgcttcgtttttttcagccgtcgttttcatgaccatttcggcagccgcttcttttgccaaggctgctttttgcaatacttcactcatttgtgttccccctcgtcaaataaattcacccaatcatctctgtgaatcacttccacctgcttcgttcctgaaagctggtcgctccgcttccctttggcttctaaaatttcatcggatgagtactgcgtctgccctttgccgataatgccgccgggccctttgacttccactacggcccctttcggaaaactgccgcagacatcggcgacgccggccgggaggagacttgacccgttatgaatcatcgcctgctccgctcccccatcaatgatgatttcccctgatatcggagaatgaaacatgatccattgccgtgtattatttactgaggacaggtctttatcgccgatataagtgccgtcgccttttccgtctaaaattcccatcagtttttcccgtccggagccggttccgataaataccttcaccccgagcgacaatgcggtctgggcggcgagaagttttgacttcatgcctccggtgccgacctttgagcctgctgatccggcatatccgagcaattctggtgtgatgtcattcagatagtcgaaccgctttgcgtccgggttttcattcggattggcatcgtacagcccgttaatgtctgtgagaatcattaattggtctgcatgaatcaaaccgcttacaagcgccgacagcatgtcgttatcaccgaacgtcagctcttcgactgatgtggaatcattttcattaataatcggcacgactccccgctccaacagttccattacagtggcataggcatttctgtaccgctctctttttgagaaatcatttcttgttaataaaatttgtgccggcgtcagaccgtatctttttaaatggtccatatattgctgcattaaaagtgtctggccgactgcggcagctgcctgctttccttttatcgtaacgggtcgcgacggatagccgagagcggaaaaacccgctgccaccgcgcctgaggtaatgaggatcacttcatgcccgttttcttttaataaagaaatggcttccgtatgttccttgatttttgcttcatcaatacttccgttactgttggtgagcgagctgctcccgattttcacaacaattctttgttttttcatcgtttctcctccgtggcaatcaatccaaaccggctctcgtcaataaaaaaagcccattccgtcctgaaaaataaggacgaaatgggctttccgtggtaccaccttgtttgaacgcgtttttcacgcgtcccgctttcctgtaacgccaggttatcgcgcctgagttttcccctcaggactccaaggcaggttcggcaggtttcatgcggcaaaatgtttcagcgggccattttgctctctgtcacagaaagttctgcgtactgatcctcttcaacgctcaatgatttttttatattatgcaaagaaaacaggttcttgtcaagacattttcatccataaaaaacagtccgcctccccggcggaccgccattaattaaatacgatcgttttgtttccgtgaacgatgacgcggtcttccagatgccattttacggctcttgccaacacgctccgctcaatcgttctgccgatattcttcagatcctctgcgtgatctctgtgatcgacgcgttcaatatcctgttcaataatcggcccttcatcaagatcgtccgtcacatagtgagaggtcgcgccgattaatttcactccgcgctcataagcccgtttatacggattagcgccgataaaggccggcagaaatgaatggtggatgttaataatccgattcggatgggcagatacaaaatcagacgtcaaaatctgcatgtagcgggcaagaacgatcacatcaatcttataccgctccagcagctcaagctggcgccgctccacttcggcgcggatgtctttgttagctttcatgtaatggaacggaatattcagcggttcgaccacttctttggcctcttcgtggttgctgatgacgaccgcaatttcggccatcatattgccgctttgccattcccaaatcagttcatgaaggcagtgcagctccttcgatacaaagatcgccacccgcttcagctcacttgccagagacaggctccatgtcatgccgaatgtctgggcgattgaggcgaacgcctgctgtaagtcttcttttttctcacgaatgcccttgcagtcgaattcgatcctaagaaaaaaccgtccgccttcagggtcagtcgtgtattgatttgattcaataatgtttgcgccatgttcaaacaaaaacgccgacacggccgatacaattcccggctggtcggggcagctgacaagcaggcgccctttttcctcattcccgcggcggtattctttcagccgctgtgtcatatatgaattcatctgttttaatccctcgtatcttcataattcgtaacttactaatagattatactgaagatttgataaaaatcaatttacgaaagaattttcagccctacggcagcgcataaaataagcgcaatgaaaaagatgcgcttcgcatccttctgctcgccgtagaaaagaatgccggctaatgcgccgcccgccgtgccgataccggtccagatcgcataggccgtgcccatcgcgatcgtctccatcgcataagaaagcagggaaaaagaagccgcaaatccggcgataatgaaaagaatccatttgactttcttttctttttgaaattgattcattaaaatgaccccgagcatttcacaaagacccgcggctatcaggctgatccaatgcattacgccttctcctccttcgtctcaggcttatcctgtgtgaccagctttaatccgatgacaccgatcagcaaaacgccgatcagcacgattttcaccggatcggcctgctctttgaaaagcaggatttcactgagcacggtgcccgctgtcccgagtccggtaaagaccgcatataccgttcctacgggcaggctgtctgtcgccttgattaatagataaaaactgatgatgattcccgtaatcgtgccgctccacgccagtgccgaatcagcatgtttcaggccggtgacccataccacttcaaatacggccgctatgaccactaaaccccatttcatgttcttcaccctttctgtatccggacaatacaaaaaagcccggatagtcgtctcacatgagattgactctcccgggcttttttccctccgtgtgcatatgcgggatatgtccgcatatgtgttttctctcggaccaggccatgtataaacatgcggaaccctagaaaacatgtctgttcgtatcatactacatttcgccgaaacgttcaacgtcagatgtgatgtcaaaaaccgtcagctgtctctcccatttggtaacggtctcaccgggcaccatgccgattttttccgcgacacggacggaggcagcgttttccggatcaatcagcgccgctatgcgtccgtattgctgcgtatgaaaaccatagtccagacaggcgttcgccgcctctgtcgcatagccgcagccccagcggcggcggacaaacatatagccgatttccatcaaagtgtttccgtttaccgtctgcggaacgattccgcattgaccgagaaatgcgcccgtctctttatcctctgcgatccaaagactgacgccgtatcctttggccaatcgtttgttccaggcaatccattccttcgtttcccgtctgcttttaagagaaggataatatttcatgacctctctgtcggtaaacagcccgtacaaattttcttcatcgtcatcccgcatagtccgcagacggatacgcccggttgtcaggatggtgccggaagacttatgtttcatcatgcacgccacgtctcctttccctgtaatagattatggatccggcaggaaaagtcctttctcagcataaaaaaaccgcttttaaaaaaagcggtttgatgattaccaaggtttatctgttccgagcgcctcggccagggccttgctgtgttttaagcggttttttcgttctccggcgcgctgaacggccgtattgtgaagcatgatttcttcctcggtttccggcacgatccgcggaacgggtaccgatttcccgtttgaatcaagcgcgacaaaggtcagaaacgacgttgccgcaagctcgcgttcgcccgtcatcagatgttctttaatgactttgacaaacacctccatagacgatgtgccgacccatgtgacgtaagattcaaggcatacggaatcctgttggccgatggggcgcaaaaaatctacagaatccattgaggccgtgactgtttcacaccggcagtggcgggccgcggaaattgaagcgatatcatcaatgtagctcatcagctttccgccaaacagcgtattgtgattattcgtatcaagcggaaaaaccctgcttgttttaacaacccttgtttctttgcaaaatcttgattctggcaacttcatattatttaaactcccctttggtgtctggtcgttttgactcattcatctgtaccctattaaacaatactttgaccgttttgtctaaaattttaaatattaagttggttagatattctctcataaatgtttcattattcatcacatccgggaataataaacgcacattgaataccgataggaggatatcacatggacgtatccattcccaaatccacgcggaaaccggcttgccgcagtgagtttgatgctttgcagacagtcatcttatgccggccggaacacatggccatcaaggatattattaacggaacgcagaaacatttcaaacaagaaaatattaacatacccgttgccctcaaacagcatagcgagtttattgacattttaagatctcatcagattgaagtcgtcctgctgcctgccgatcccgcattgcctgagcaggtattcacccgggatatcggatttgtcttaggcgagacggcgtttatttcaaacatggcggcttcagtccggcagggagaagaaaaagtgtttcaaaacctgcttgacaataagaaaatcccctatacgcgactgaaaaaagcgaacattgaaggcggcgacatcttgatcgcagacggcaccgtttacgccgggctgagcaagcgcacggataaagcggctgtccgggagctgcgggaggcgctgccggagatgacggttgtgccgatccctctcaaggaggatttcttacatttggactgtgtatttaatatgatctcggaaacggaggcgctatactgcaaaaatggcttgcggcagaaagaaattgatcttctcgccgaacgttttgagatgatagaagtgcctgaagaagagcaattcacgctcggtcctaatatcttgtcaatcggcaatcagacacttatcagcctgccgcagcaccgtcatacgaaccgcgagctcagaaaaagaggttatacagtcattgaaaccgagttttccgaaattattaaatcaggcggttccttccgctgctgcaccttgccgcttgtcagaacatcttaaacatttacaaggcagtttccttcaagatacgttaatatagagaagacaagactctaaagggggaaaccgaatggctaagtacataggatacgcgggaacatatacaaaaggcggaagcgaaggcatttattgttttgaacttgatacagaagcgaaacggctcagccgtccgaagctggcagcaaagctcggcaacccgacatacgtcactccgaattctgataacagcatgctgtattccattgaaaaggcagacggaaaaggcggcgtcgcagcctatcagattcatcagaacagcggggaattaacttttgtgaaccaccagctgattgaaggcccgtctccatgccacgtcagcattgatgataaacatgaatatgtgttaaccgctaattaccacagcggaaaagtgcacgcctttcccgtcaatgaagacggaagtctgcgggagccggctgccgaagccgctcatacgggaacaggtcctcatgaaagacaagagaaaccgcatacccatttcgcaggctatacacctgagcataactacattgcagccgtcgatttagggacggatacgctttatacttaccaaatgaaaaacggttcgctcacagaggtgaaaactcactctttcgcaccgggttcagggccgcgccacatcgttttccatccggcggaaaaatacgcctatgtcatgacggaaatcagtaatgaagtcatcgcgcttgaatacaacccgaccttaggtgaattcagagagttgcaggtcatttccgctttgcctgaaggctttacggacaaatcgcaaggcagcgcgatccgcatatctaaagacggcagatttctttatgccgccaaccgcggacatgacagcatcgccatctttaagatcaaccaatattccggtgaattgtctcttattgaatgggtgccgacagaaggcaactggccgcgtgatttcgcgtttgacccttccgagacattccttgtcgcgtcaaacgaagaaacgggaaatctggttttgtttgaacgcgacccggaaacaggcaaattgactctgcttcaatctgacattccggttccgtatccggtctgcgtgtcatttctgcatcaggtttaatcaaaaaagaaagctgactttatattgtcagctttcttttttgtataaatggcaggcgacaaaacgccccgccttcacttcttcaagctcaggcgttatcttactgcatagctccatcgcttcaggacaccgcgtcctgaatacacagccgctcggcgggttaagggggctcggcagctcccctttcagaataatccgttcacgcttgtcctcaagaagcggatcaggaatcgggattgaggataaaagcgccttcgtataagggtgaagcggttcccggtaaagcgcagcgctttctgtaatttccatcatgcggcccaaatacatcacgccgatccggtcgctgatatgcttgaccattgataaatcgtgggcgataaataaaaatgtcagccctttctctttctgaagcctttttaaaaggttgacgacctgagcctgtaccgacacatccagcgcggaaattggctcatccgccacgataaattcgggatgcagagagagcgctctggcaatcccgattctctgcctctgtccgccgctgaattcgtggggataccggctgccgaaatccggatggagcccgacagcttcaagcagttcatccgctatcatcagacgggcttttcttgtattgtaaagattgtggatttccatcggctccataataatttcccttacggtcaggcgcggatttaacgaggcgtaagggtcctggaaaatcatctgcagcttgcggaagaagaccgaccgctgttctgccgcggcacggtgtatatccgtcccttcatatgataccgaaccggccgtcgggtcatacagacggagaataacccttccgagcgtcgatttaccgcatcccgattctccgacaagtccgaatgtttcccctcttttaatgtgaaaactgacaccgtcgactgcttttacggctttctttcttcctgcgtcaaaatgcattttcagcccgctgacttcaaggagcggagatgccgtcattttctattcccccttttcgcttatacagcggcgtacggtgcataattctttttcatagacggttccttccaaagacagcacttcgattgtttttcccgttttcggggagtgcagcattcggccgtctcccagcgccaaaccgacatggtggatcgcgccttttccttcttcataggcgaaaaacaaaaggtcagccggcaggatatcgtttaccgccgcgccgcatccggcttttgcttggtccgttgcatcacggggaagggtatagccgtttgctttaaatatcgaatacataaacccggaacagtcaaacccgaaaccgctcagtcctccccataaatacggaagcccgagaaacatcatgcccgtttcgatgacatcggccgcccgtccttccgtatgccggcactcgtctgcgtcagcttcatttacgaacctttctccgagcggcgtcaccacccggaaaaagcctttctcacgtcctgatgccggaagacgcgttaagaaacttacttccaagtctggttcgccgtttgtgtgatataaaaaagctgtcggtttggtaatccatacggcgggggaagatgcatgaaagccgtcttttgaaagctggctttttttcatccaccccggatatccgcgcacatccttgtttgaaggctggccgggaacggcgacaaaagcccattccccttcctctttgagaatgatcacttcttccccgaaaagcgcttgcgtttggacaaggttgtctgtgcataattgcagccgctcttcatatcccatagacgctaaccattttctgatctgcggcgggttttcgagcatcggcgcatcatacgaacggggagatgacggcagcgtccatacgttggctgctgccgctgtaacggctgctctcatcttttcgccccctcttgtatcgacacaccggtaatgccgagacccggttcgtcgggaatcgcaatctgactgccgctgtatgtgatgccgccttgaatcaaatcatctttcagcataagcggcgcatcaaaatcaaaccttgtcacattccgtttgcccgcggcaaaatgggccgcggcggtgatgccgagtttggtctcaatcatgctgccgaccatgcattccacgccgcacgtttccgccatcgcattgattgtttccgcctgctttatgccgcccgctttcatcagcttaatattaattaaatcggcgcttctcgtctgcagcacgtgaaaggcctgacggggggtaaagacgctctcatccgccataatcggcgtgtctacggcatcggtaacctgcttcagcccggcgatatcgtctttgtgaacaggctgctcgaccagctcaatgccgaggccggcgtcttccatctttcggatcgcggtcacggcttctttcggcgtccagccttgattcgcgtccagtctcagtttgacgtttccgccgacacgtgatctgatcgcccgaatccgcgcaacatcgtctgatatgtcacctatgccgacttttatttttaaaatatgaaatcctttgttcacataacggtctgcatcccccgccatctcctcaggagaattgacgctgacggtaaaatctgtttccagtgtattccgatagccgccgagaagccggtaaagcggctgtccatgcatttgcgcccatccgtcatatacagccatatccaccgcggcttttgcgctttgatttctttccaacagccggctgatatcaaacaaaacggcttccatgccggaaaggctccgccccaagagagcgggcttcagcacatcgtggacggcgctttcaataccggccgcgctgtcacctgtaatgacaaccgtcggcggcgcctccccccagccggtcagaccgttgtcaaaagtgagcttcacaatgaccgattgagcattgtaaaccgtgcgtaaagcggtcttaaacggctttttcagcggcacggacatccgtcccgtttgaatatctgtaatcctcacgcctgatcactcccttccggaaacccccgattcaatcgttaccgctttggccgccgtatccataaccgcgcgggctccgatcggaacagcgaagctcggtgtacaatggccgattttaaagcctttgagcgcgggcttccctgatttaacaatgtaatcgttcagcacttgctctaaagtaagcgacttttctttatgtttcggttcgcattggtgaaaatcacagaccaggattccggctgcgtctgacagttttccggccatctttaattgattcagcattctgtcgatttgatacggctcctcatcaatatcctcgataaacagcaatttgtcttttgtatcaatttcaaacggcgtgccgagtgtggacgtaatgagcgacagattgccgcccgcaagctctccctcggcccttccgcctgtcagcacctctaagggagaaatgtcctccgtataggtaaattccgtttctgtaaaaagctgacgatacgacgcttttgtcaggggatcagcatcttcaagcccgacatcggtgctcagcatcgggccgtgaaatgtgacgagccccgtattttgatgaatggcggtatgtaaaaacgtgatatcactgtatccccagaaaattttcggattgcggcggattaagccgaaatcgatgtcggcggcaatgcggcccgtgccgaatcctccgcacgcgcatatcaccgctttgacattctgatcactaaacatgtcatggagatcatcgagacgcgcccggtcctctcccgccaaatagccgtgacgggtcttcagcgcccggccgagtttcacttgaaggccaagctcattctctaaaaacagcagcgcggtttgcagtgtcccgctctcaggcgggcttgcgggcgcaatcacaccgaccgtgtcgcctttttgcagtgctttcggtttatggttcatgactttttcaatctcctttccggattgaaaagtgaaacacgccgctcctttaacggcaaaagagcggcgtatgtttccgctgtaagatcaggacttttccgcccacttcagatcaatgtaaccgacggggtgccggacaatgcccttcacgccgctgttctgcagatgcacctgattgtaaaagtaaatcggaatgatcggagcctcgttcatgagcagtttttccgctttatgcatgagcgcaaaacgttttttggcatcggcttcctgttttgcctgcttgatgtagccgtcgtatgccgcgctgccccagccggtgcggttcatggaattatccgtctggaaagcctctagaaaactgatcggatctgcgtaatccggtaaaaatgagctttgagagaactggaacttcagtcctttctgctcttctaaaaagacgttccattccatattggcgagcttaacgtctataccgagtacacttttgagcttctgctgaatcgcttccgctattttcttatgctccggttttgtgctgtatgtcaatgtaacggcgggcagcttgtcataatgctcttctgccatgcctttttccagcagttttttggcttctgattcatccggatttaataaactgccgcccgcttcgcggaaatctttcccgtcaggctgagtaaatcccggggatacaaaggcatgtgccggcttttcactgtttttggtcacataatccgtgatttctttctgatcaatcgctgccgcgaacgcttttctgatcttttcattttgaaacggctccatttttacgttaaaacgatagaaatagagtccggcctgatcccacgtgcggacattttttcctcccatcagctgctcgctcagctctgccggcacaaaggcggtatccaaatcccccgactggaacatctgatagtcggtattccggtcactgaccatcgcccatgtgactttatccagtttcactgtctttttatcccaatacgtctcgtttttgaccatcgtcatgctgtcgtcatgcttccattccgtcagtttgaacggcccgttgccgacaaaggtttttgcttcagtgaaccatttcggatcagccttggcgaccttctcattaatcgggaaatacgccggattggacacgacgctcagaaaataatcctgcggtgccgccaatgtgacgacaagcgtttttttatcttttgccgtgactttcacgtcttcttgtttgccttttccgctgttaaattcttccccgcctttgatcatgtagccgagaaaagcggaagatgcgcccgttttcggatcgagcatccgtttccaggcgtacacgaagtcttccgccgtaacgggatcgccatttgtccattcggcgttatcccggatattgaaggtatatgtcagcttatcagcggacaccttccagctttccgccatggccggttcgggcttattatcttttccgagcctcgtcaatccttccatgatgttattcagcggctgccaggaaacattattaaatccgatcggcggatcaagtgaggtcggctcattttcgttattgagccgcagcaccgtttcacccccctgttcttttgctttgccgggttctgtccccgcctgttcattggctgtacagcccatcagagcaaacgaaacaacagcaatcacaccgatcgcccatctctttttcatttcaatccccctttttcctctgctgccgtcagctgctgcttcagccgctctgcacggtgatcctgaagccagcagttgacgatatggcttttggatttcacggttgttgccgggtataccttttcacagacgatcatcctgtccgggcagcgggcggcaaacgggcagcccggcggcggatcgaataaatcaggcggcgtcccgtcaatcggcgacagctcactatcctccatatccagccgcggcactgaacgaagcagcccctttgtgtatggatgagccggacggtaaaaaatatcatgcctcgtgccgatttcggcgattttccccgcatacatgacggcgactctgtcggcggtctgagcgacgacgccgagatcgtgtgtgatcagaataatagacacgcctgtttttctttgaatcttcttaaataattcaaggatttgtgcttgaatcgttacatcaagagccgttgtcggttcatcggcgatcataatttccggctcgcagatcagagccatcgcaatcacgatccgctgccgcatgcccccgcttaattggtgggggtactgcttcaggcgggatttcgagtccgggataccgaccagatccagcatggcgagaacttcggattcagcttgttttcttgccatggcgcggtgttccaacagcgcttctgagagctgattccctatggtcaaagtcggattgagcgccgtcatcgggtcctgaaagatcatagaaatatcgcgccctcggattgcccgcatttcccgatccgacattcggcaaaggtctttctgtttaaattgtatgcttccggattcaatctttgccgaatgtttcggaagaagacccatcacggcttgtgacgtcacgctttttccgcagcccgattcaccgacgatcgcaaacgtttcacctttatataaatcgaagctgacgcctcggacggcttttacagtgcctccgtatgttgaaaaagtaacatgcagattttgaacggaaagaacttgctgcgccatttttcctacctcctcagtttcgggtctaacgcgtcctgcaagccgtctccaagtacgttaaacgcgtacatcgtcaaggaaatgaaaaaagcggggaaaaacagccgccaccaatggcctgataaaatcgccggcagcccgtcgtttgccatgactccccagcttgcaaacggcgcctgaatgccgagtccgagaaaacttaaaaatgattccgcaaaaatcgccgccggcaccgtaagcgtcatttggacaataatggctcccatcgtattcggcagcagatttttcttaatgatccgaaatgttttcgctccaaacgttttcgaagccaatacgtgttcatcatgcttcatcctcagcacctgccctctgacaatccgcgccatgccgacccatcccgtcacggtcagagcgacgataatggaactgagccccggccccatcagcaccattaacaaaatgacaacgagcagatacggcaatccgtagagaacctcgatgattctcatcatggcgctgtctgtccggccccctttgtagccggcgacgcctccgtagatgacgccgatcaaaaagtcgatcagcgccgccatcacaccgacaaataaagagatcctcgctccgtaccacgttcttgtaaacacgtcccggccaagttcatcggttccgaaccagtgtgaaaaagacggcggaagattctgctcggcgagcgtctgccttgtcacgctgtgcggtgatatcagcggaccgaacacagccgatagaaacaggcagcataatatcacaaggccggccatcgccaatttgttctttttaagccgccgccacgcatcctgactgtaagacaggctcggacgcttgaccgactcggtttcaccctttctttccgcgcccggctgaaaccagtcatcgggcacttctgtgtgttttaccgtttcttgcgggagattcatcaggatcaccctttcttatgaagttttatgcgcgggtctaacaggccgtatgccaaatcaaccagaaacagcaagacgatcagaatcacactgtaaaatacggtcgttcccatgatgaccgggtaatctcgctgattgatgctttctacgaaatatttgcccattcccggtatggcaaaaattttctcgatgacgaaactgcccgttaaaatacttgcggcaagcgtcccgagtactgtcacaacaggcataagagcatttttcaatgcgtgtttgatcacaattttgacgggagaaagcccctttgcttttgccgtgcggatgtaatcctgagtcagcacttcggccatgcttgatcttgtcagcctcgcgataatggccatgggaccgacggcaagcgcaacagtcggcaggaccatgtggacgggactcgtccaggtagctgccggaaaccatttcagatgaaccgcaaattgctgaatcagcagcgtagccataataaaattcggaatggaaatcccgagcaccgcaaggctcatggccgcatagtcgagaaagccgccgcgcctgagagcggccattatgccgagcgcgagtccggaaataacagcgatgatgatcgccgttatcccaagctcaaatgagaccggaaacccgcgttcaagcatagcgtttacactgtctgacggttttttaattgaaggaccgaaatcaaaggtaagaatggattttagatagatggcgtattgagtgataagaggttcgttcagatggtagtaggattcgagatttcgctggaccgcttcgtttgtgccccgctcttcgttaaaaggcgagccgggtatcactttcatcatgacaaatgtcagagtggtgatgacgaggacggtcataatcatggcgataaaacgtttgataaaataccgcagcaatgccgttcacccctttaacagaatgttgttctcatggcgagttctgtcatgacgagcatggcctgataggcttccggcatgtcttttgcctgaaattgaacgattgtcgttcccgggatgatttctgtgcccggcattaaatgggcccattcagcctgtccgtagttggcaaattcaatgcctaatacaggtctttcaggcggagtcagcggtttgaccttatctttatttttgagcgcataggctgttttttccgtcaggagccgtccggctttttgaggggacaggcatttgaccgcggttcttgaaatggtttgtttgacggcggcagtcgtcacattcgggatcagctcctccgcttcttttgcggcgcaatcatctccggcagccatgatgaccgggacatcgtaaaatccggcgagataggcatttaaccccagttcaccgaccggcttatcatttatgtaaaagtggcggacgccgaatatcatgctgtgcgacatgacgcccggcatcgacgctctcgcatgatagccgataaacatcacgcccgaatacgattcatcaaggccctgcatcatggaaaacggcttgacatcccccgtaatcagttctgcctcagggtgaagtttttccgcgagcagattattcatctttgagtggctgtcattcacggtcacttccgtgcatccgttattaaacgcttctgcgatgcaccagtttgcttcttcggtcatcagaaccctgccgcgctcataattgtgcatgcgggaattgacaaatgtttcatcaggcagtccggaaatcccttccatatccacagatagatacagtttcatgtaatgcctccttttttacttaaaatttcgatattaaattatgaatattctaacaaattatattaaaaaaggatgaaacatgcaatataccattctgccattatgggaaaaaacaaacccttttcaccgggaaaagggtttgctgatagaaaaagttacatactgtttttgcttatatgatgacgctgaaactgtctgaccgcacttctgtattcatgatcgggaatgacctgatgcctgatcggttcaggagcctgcggcgaagactgttcagccgcctgcttacggacggcatgcggtttatgcgccagcttatgtcccatgccggtcgcattcatgacaaatgataaacacactaaaagcaagcttaagatgaaagcaataagaaacaaatcgctgtatgtccccatcagcaggtcatgcggtgattgtgtgccgcgcgcgccccgaagcgtgccggaagcatctcttttcgtaaaataccctattaaaacaggtgcgcccatataaatgaaaagcctcaaaaactgaactgccgtcatgcgtttcaccagttccggaagcggtccgcccaacgcggctcccatcagtcctgctgccacaataagccctgtcccggccgccagcatcacgaaaagccccgcaaatagaataagcggtatatgatgatccgccgtcatccattggaaattcacgaacaccagtataacagagcctgttatgccgagcatgcccggaccgactttatcatatgctaatgcactgatgacagcggcgatggccacgcctcccaaaaggctcgcataaaggaatatcagttgagtttgtgacatatgatatgcggtctgaagctccccgtgaaatgcagaaagactgaccgctatggaaatactgcccgcagcgatcatgaaaacacccagaatcggctttggaatcagcataagtttaatcgaaatcagcgcatgttcgtttctgtactgcatgatcagcaagatcagaagaatgacgatgcttcctccaaatcccgccaatgtctgccatgatgaaaagccccatttcggcagatgaataaatgtataggcggtcagcacggctgatacacccgctaacagaaaaccgatgccgtcaaatggagatttttcagcatttttatgagcgtcatcccgcagccacatataactgaaaatgaggccgaaaaaagacagcaggccaaaaatgccgaacagccaatgccaatggccggcgcttgccgccgccgtgcctaaaacggttcccataatgacggacccgtaaaatccgccgatcaacacaaataatgcgtaattccggcgctcaatcggaaacgaaagcaccagcatcgggatcataatcatcagcatagtgcccgccgcagctccctgtaaaaaacggcccgcggcgagcggataaatatcatttgtcacagcagcaaggagcgctccgatgacacccgcggccatcgaaatcacatagacaggccgggagccgaatctttttcttaaatacggccccgccggcacgaataaggcaaatgccatattaccgataataatcggatgaaaagagtcaaagttttccccgccgaccgtctgccggacaaggctttggacagccgaaagagcggtattcgacatcagccccggcccgaccgccaatacagcgagcagagaaataatccagtgatgtttttctttcatgtgacagctcctttctgactatttgacaaagtgaaaaagctaacagatctcccccattagcttgacagaattttcatatcttttcatgtgaagaattgaacataatatctcatttattatttcaaatccgatggaaattgtcaatataaagcgccgccgtccgatttcgtctttttcacaatttcccacaatcttttcattattatcccacactttttgtttaagatggagtcagtaataataggcaaatcatgctatgatgaaatagagaaacggagtgaacatgatggataactatcgtgatgaaaatcggacagaccaaaaagaacaggaagtccttttagtaaaagaaaacccgcagacggccggatattccgcgccggacgaggacaagaaaaaacgaagcttcggctggttcagaccgcttctcggcggagtgatcggcggagggctcgccctcggcatctatacatttacgccgcttggagaccatcagactcaagatacttccaatccggctcccgctcaggaaacgtcatcggtaaccgccaagcagacatcttctgaatcagacagcggcaaatcggcaaacagctcatcggcaaattcaagcagcatttcgaatatggtggaagacatttcaccggcgatcgtcgggatcaccaatctgcagaagcagcaaagcagttccgatttattcggattcggatcaagctcagattcaaactcaaattcatcgggtgaagatgcggaaacgggatcgggttcaggcgttatttttaagaaagcaaacggcaaagcgtatatcattacgaataaccacgtggtcgaaggcgcctcttcccttaaagtgtcattatatgacggcaccgatgtaacagctaaactcgtcggcagcgactctctgacagacttggccgttttagaaatcagtgataaacacgtgacaaaaacggcaagtttcggcagctcatccgctctcagaacgggtgaatccgtcatcgccatcggtgatccgctcggaaaagacctttcccgcaccgtcacacaaggcatcgtgagcggcttaaacagaaccgtctcgatctctacgtcagccggtgagtcaagcatcaacgtcatccaaaccgatgccgccatcaatcccggaaacagcggcggaccgctcttgaatacagacggcaaaatcatcggcatcaacagcatgaaaataagcgaaagtgatgtagaaggcatcggctttgccatcccgagcaacgatgtaaaaccgatcgccgaagagcttctcacgaaaggacaggtggagcgcccttatatcggcgtgagcatgatcgacttggaacaagtgccgcaaaactatcaggaaggcacactcgggcttttcggcaaacagctgaataaaggcgtttatattcgcgaagtggcgcagggctcacctgcagccaaagccggattaaaagcagaagacatcattatcagcttaaaagggaaagaaaccggcacgggcagcgaactccgcaatattctctacaaaaatacgaaagtcggcagcaccgttgacgtgaagattatcagaaacggcaaggaaatgacgaaaaaaatgaaactgactcaaaaagaagaaacatcttcttaacaaaaatccaaggcagccgccttggattttttatgtacagcggaaactttaggcctggatcaaccgtatgacttagtgtacaaaggaggatacttacacatgaaacaaacaggacttttgctggtcgttacaggcctgatcttgctgcagctgagcattcagcttcctcagcaaaacgctgcttgaggtatgacgctgggtgcaagcattttactgaactttcgggaaccggactgatcatgcgctctctgcacacgcagaccggccgcagatgaatgaaaaaagccgcgggacattctgtcatcccgcggcttttatttcacataaaagcaccctgtccgctggccggacagggtgtttcggttaagacatatgctggtcccgataaatcttttcgtttttcatgccgtacgctttttgcacgatatagagcggacggtcttttgcttcgtcataaatccttccgatatattcgccgatcattccgagcattaatagaacgatgccgctgaataacagctgtatcacaatcagagaggaccagcccgtaatggtgctgttcgtaaacagcttcatgtataaaacgataaacatatagagaaaacccgctccggacatgatcattcccgcatagcttgccgccttgagcggtttatgagagaacgttgtgatcccgtccatggaaagcttcagcatttttttaagcgggtatttcgtttcccccgcaagccgctcatcacgttcatattctacagcagtctgcttaaagccgacccagctgacgagtcctctgacaaaaggatttttttcttttaatcttttcatctcatcacagacttttctgtccagcaggcggaaatctccggtgtcgagcggaatatcaatatcagtcacgctccgcagcagccggtaaaacatagaggccgtctgtttcttgaaaaaggtttctccctttcgtttcgttctgacggcgtacaccacatcgtagccttctttccactgctcaatcatatcaaggattaattcaggagggtcctgcaaatcggcgtcaatgacggcgattgcattcccctctgcataatccatacccgccgtgatcgcgatctgatgtccgaagtttctggaaaagtcaataattttcactctcggatcaatcagactttgctctcttaaaatctcaatactgcggtctttgcttccatcattgacaaagatcaattcataatgctcttttgtttgatccatgacttctttcaggcgctgataggttgtctgaatgacgggttcctcgttataaaccgggacgactattgaatattgaatatgtctgctcatgttttttcctcctattcatcagattgaagttcgtatagtgaagctgattgattcattccgcccggcccgccgctcattcggctgtttttacccgcggccttgctgctttttgtatcagccggatcactatttttcgttttctgatctgtgcttgattgccatttatctgaagatactttctttccgtttttctcaacccactgcacaatatcgttatttccgcctttgcccattccggatgttaagaagtattttactttcccttcttttacgagctttttaaattgagtcagcgtaatggccgggtcagacccgctgaatccgccgatcgccatgaccgcttttttcgttttaataatgtaaggcgccgccgtgttggaatcggttgcagcaaatagatagtccgctccggcgttgtgtttctctaaatagttgatcagttttgtattgacagatgcgttatccattcccatgccttttccgcttgttgaagcgagctgagggcctgtttcaggcaatgagctgttgcctccgtacagaagcggtgtgctcgcccaataaatcggcataaccatcaagacgagaagggctgcaagtgaaacataataacttagcggtttttggcgctgtttgaatacgaacagggcgattgctgccactgcgccgagaacgcctgctccgatgctccagcctgcgccgatttgatcattgtagtttctgaggataaacagctcaaatccggttgtcacaagaatagcggccggcaatagccaagttttccatcccgcctgcttgcggtacagatgaacgagggcgacccatcccgcaccgacaagtgccgcgatcggaggcgccagcataatgagataataatggtggaaaaattccgccacactgaagaatccggcaatcggcacaagccacgctgcccaaaagatcgtttccttctgttctgctgataatcgtcttctttctctcgccccggcgatcaataaaccggccattccaaaaatcgcaaacggcaggagccagctgatctgatcagataattccgtttggaaaaggcgcagcggaccaggagttcccgttccgaacattcctgaacctgattgcattttcgagccggtgcctgcaccgctttttcctccgccaccgggaccatctccgccgcttggaggacctccttgaccgccgcttggcattttcccgttagatggaggtgccgtcatactgccgttttgtggtttgtctccgcttgctgaactgctgcttgaagactggccgggcggcgcttgcatttgtgaagaaccgccggaagaagacatctctttcgatgcgtttccgtccggcccgccctggccgccgccggaactttgccctgtcagccgctgaatcccgttatatccgaaagccaattccaatacggagtttgtctggctgcttccgacatatggccttttgccggcaggaatattatcaacaatgagcggccatgacaatgaaacggctgctaaaacggctaacgcgcttaccaatgaaatgatttttttcttaatcgtggtgtttgccgcaatcatatagaacagcaagaaggccggcaaaatcatataagcctgaagcatttttgtgttaaagcctgctccgacgacaaaaaatgccgccaaaagccagatcagtctgccttttctgatcgctttaaagagaagccatgtggcgaacaagaggaaaaagaccagtaaagcatcgacattattcgtccgcgcgaccgctactgcgatcggtgtacacgccatgacaaatgaggcgatgcgcgccgccgtttttccgaacgtcggctttattaataagtacatgaatagaactgaacctacacccgccaatgcctgaggcaggatgacgctccacccgtgcataccgaatatcagcgcgctgatcgtttgtatctggtatgtaacaggcggtttatctaccgtgataaacccggctgcgtcaaatgaagcgtaaaagaaattatgaaagctttgaagcatactcgttaccgctgcggtgtaataaggattcaccgtatcgtcattccagatgttgtacatattcaagaatgcggaagcgagtaaaatgagaatgaagactgcgtctatctcgcgttttttcattttcacctgtgttttcactccttttgtttaactttgaacaagtgtaacaaccaaatgtgaaaaatttattaataaacaaagacaattattttgccgtttacaaataggtaaaaagaatgacaaaacgggtaaaaaagcaaaaaaaaagatgcccccgtcaagccgggaggcatctgtcatgatttctgatttactgtatcggtttcagccgtgcttctatttcagaacggcggtgttcgagataaggcgggagcgcaaccgttttgcctagctcttcaggtttttcatcaaccataaatcccggaccgtccgttgacaattcaaacagaattccgttcggctcccggaagtacagcgctttgaaataataacgctctacaatgcctgagttgctgaaaccttctttcgtaatgatgcggtgccataaagcaagctcctcttcattctgaacgcggaaggccacatggtggacgctgccttttccaggacgctcgcgcggaagatcgtttctttcaatcagatggacttccgtgcgcgcgcctccgtttccggattcgagcaccgtaaccgtgccccggtcttcatgcgtttctttcccgatttcagtgaagccgagcacatcggttaacacacgcagcgtcggttctgcatacgggacggtcaattcaacgggaccaagaccgcggaaagaatattcttccggtatgccgctttgcttcaccgcttcaccgatgtcttttcctttttcgtcagctgtcagcacaagccgctgtccttcatgatcccaaaaagcgagtgtctctctgcccgctattgtcatgatgtcgccatgagcgacctgatgctcttcaaatcgttttttccaatattgaagcgcttgtgcatccgggacacgcaggccgattgaagaaatactgtttgttcccgcatgaaacggtgcaatccgcggaatttcgaaaaacgtcaattccgatcccggattagctgtttcatcaccgtaaaataagtgatacatcgtcggttcatcctggtttacggactttttcacaagcttcaatcccaggatgttccgataaaaatctaaatttttctgcgcatcagccgtcaatgctgatacatggtgtattccattaactttcattatgttatcctccagtcaattatctcgatttcgagatattttatatatacaatttatgttatccggatcgcaaagtcaacccatctgcttcacagacggtctgcagactgtcgctccccaaataacgaaccttcgatattaaaaaaccattaatgttcgtttttaaaacggtattttttccttctcaaaagcagaaacctctatcttttagggaaaacaacaaaatcagaaaatttattttattcgcgtttcagcaattagggtttacaatatggaaaatagttttttcagcatgacgattttacatctggagggaaaggatatgcagattgaagagaacggacttaaaaaagagatcggccttaccatcgccctctcacttgttatcggcaccatcatcggttccggcgtatttatgaaaccaggcgccgtgcttgcctactccggtgatgcgaaaactgcgcttatcgcgtggctgttaggaggcattttgacgcttgccggcggcttgaccgttgcggaaatcggcactcagattccgaaaacgggcggactttatacatatctcgaagaagtgtacggcgaattttggggctttttgtgcggatgggttcaaattatcatttacggccccgccattatcggagcaatcggcttgtatttcggctctttgatggcgcacttgttcaattgggattccggctggtctaaattgatcgggatttcagccgttttgtttttaagcatcattaacattatcggaacgaaatatggcggcatcgtccagggaattacgactgtcggcaaattgattccgattatctgcatgatcgtgttcggcctttggaaaggcgatcagcatattttcacagccgttacaagcagcatgtcggacatgaatttcggcgctgccatactggccaccttgtttgcttatgacggctggattctgcttgcggcactcggcggcgaaatgaaaaatccggaaaagctgctcccgagagcgatgacgggcggactgctggtcgtcaccgccatttatcttttcattaactttgcgctgctgcacattcttcctgcgaccgacatcgtgaaactcggtgaaaatgcgaccggcaccgctgccggaatgctgtttggcgacatcggaggaaaattgatcagcgtcggaatcatcgtcagcatcttcggctgtttaaacggaaagattctcgcttttccgcgtgtctcatttgcgatggcggaacggaaacagctgccgtttgccggacagatttcgcgggtgcatccgacgttccgcaccccgtggattgccgtgtcatttcagatcgcgctggccattatttttatgatcgccagcaatcccgataagctgtctgaaatctctattttcatgatttatattttttacgtcatggcctttttcgccgtgtttatcctcagaaaaaaaagcggcggaaaaccgcgcgcctacagcgtgcctttgtatccgatcattcctgttttggccatcgcgggttcactgtttgtgctgatcagcacgatcattacagatacactgagctgcgtgctgtccctcttgatcggcctcgccgggctgccgctttatttttggctgaaaaacggcagaaaaaactgacaaaaacggttccttttacgggagccgttttttttctggcaaaatcacgtgcaaaagttgacagcaaattcacatcttttgttatactttttaagcaagatgtctgaattcgaagtatgttacgtttttttggcgaagtgggtaacataagaaaaacaggatgagacacgtttttacgaaaaaatcaagaggcgtttttttcgactttatctgttttttttcgacaaaaggctatataataatttgatgtgtgcattgtctcattcaaacaatggagggtttttaatgataaaaagaaaaaaagataagttctcactccttttaacagaaatcgcaaaaaacatagacgaaaccgcagaatactttgtcaactttaaagtgacgaaccagacgactttaaaggaatttgccgatacgttaaaagagtttgaaacaaaaggagataatcatgttcatgtcatgattaaagagctgaacaaagcttttatcactcccattgaacgtgaagacatccttgagctgacaaacagcctcgatgacgtgcttgacggaatcgaacatttttcagcaatgatggagattttctcgatcacttcttccgatgagcatatcgataagttcagcggatacatcagagagtgcgcgaaggaaattttaatcacgattgaactgcttgcagaaaaccgattgaaggacattcaccctcacgccattaaaattaaggaatacgagcacagctgtgataacctgcaccgtaaatcattaaaaaatctgttcggcacagaaaccgatccgattaaagtgattcagtaccgcgaaatttacgaaacgcttgaggaaattgccgactcttgccaaagcgttgccaataaccttgaaaccattattatgaaaaacgcgtaacgaggggttataatggatactctattacttttaacgatattaattgtcatatgcgctttggtatttgacttcattaacggatttcacgataccgcaaacgccatcgccacctcagtttcgacaaaagcgctgaagccgcggcacgcaatcgtcatggctgccatcatgaactttctcggagcgatgacatttaccggtgtggcgaaaaccattacaaaggacattgtgaatccttatacattagacaacgggtcagttgtcattctggcggctctactcgccgcaatcgcctggaacttgatcacatggtatttcggcattccgagcagctcttcacatgcgattatcggagcgatcgccggagcggccattgcagcgtcaggttttgcaacgcttaattataaagggttcattaagattctcgaagcacttattttatcaccgatcatcgcctttgttctcggctttatcgtatattcgatcgtgaagctgatttttaaagacagcaatttggcgaaaacaaataaacgtttccgcagagtgcagattttgacggctgccattcagtcctatacacacggaacgaacgacgcgcaaaaagcgatgggtatcattacgatggcgcttatgacggccaatttacataaaagtgatgccattcctttttgggtgcagctctcttgtgccctggcaatgggtctcggcacatccatcggcggctggaaaatcattaaaaccgtcggcggaaaaattatgaaaatccgtccggtaaacggcgtatctgccgacttaaccggcgcagccattattttcggggccacgtttattcatctccctgtcagcacgacgcacgtcatttcgtcttccattctcggtgtgggcgcttcccaccgcgtaaaaggcgtaaactggggaacggctaaacggatgctcattacatgggtcatcaccctgccgattgcaggtacactcggcgccatcgcctttttcatcctagatctctttttctgatgacatccgcttctttacagaagcggtttttttgtgacaggaaaatgatgtcatgacatagaatgaacatagcagaccatttttcaaattgtgagggatgctcatgcttatgttttttcagattatggtgtggacgatggcggccgcactcattttatatgtgtacgcatcctggcggtatgaggcaaaggtaaaagaaaaaatgtttgccatccgtaaaacgtggtatttactatttgtactgggctccatggtctattggacatatgatcctgaatcgctctttgccgcatggagacaatatttgattgttgccgtctgctttgcccttattgatgcgtttatctttttgagcgcgtatatcaaaaagctcgccggcaatgaattagagacggatacgcgggaaattttagaagaaaataacgaaatgcttcactcctatcttgaaaaactgaaaacctatcaatatctgttgaaaaatgaaccgatccatgtatattatggaagtacagaagcttatgcggaaggcatcagcagactgctggccgcttatgccgaaaaaatgaatgtcacggcttccttgtgcgactattccgcacaatcggataaggaccgcttgacggagcatatgcctgatgcggcggacgttcagtcccgtcttaaccgtaaagacgtctactatgatcaaaaaggcaggcttgtgcttattccgtttacagtccagaaccgccattacgtgatcaaactcacgtcggaaaacctgttgacggaattcgattatttgcttttcacatcgctaacgagcatttatgatttaatgctgccaatagaagaggaaggtgacggttaaatggagcaggcatttcaaaacgggcagccggaacaaagagcgaaaccgttcaaaatgtttaaaaaacgttcaatgacaagtatcgcaagttaccaggtcagccctcataccgccagaattttcaaagaaaacgagcggctgattgacaagtataaacaaaaaaaagcttgattacactaaggacaggagacacggctcttgtccttattccttttttccttatctttcatataataaaaccaacaaagagatgcgacaggtgatgatgtgaagaaaattgtcaggcgcgtaaagtttgtggattacggacgcttcgggctttccgcttattcgctgaggatgcgggcgaggaatctcaggctattgaaccggttaaaaaagaaaaaaggctgaatcccgcaatgtgaacgggactcagccttttttgttaaagctgcatcagaattttcgcttttacagcggggccgtagacgccgtcagacgtcagtccgtttacagattggaagcgggccacggcatctgcggttttcggaccgtagataccgtcaattccgttattgacagctcctttttcaggatagaaataaagcgcggcgagcgcgttttgcacctggtataccttttcgccggacgtgtacggctctgtcagctgaatcacctcgtccggaagagaatacagtgcttcaaccggcgggctgacgatcagtacttgtccgactttaatcaggttcgggtcagcgatgttattccatttctgcagatcggccacgctgacgccgaatttccgcgcgatcgccgacagcgtatctcctttttggacggtatacgtctgtctttccccagaaccgattcccgctttaaactcatcccatgtatccaacagtcttctcggacaaagctttcctgaccaatgcttgtgcgcaacgacatttgcaagcgtgatgccgtgagaggtcattaatgtgcggatgagccattgggcgtttgccacggcctgtgaaaagttgccgtctgcgttttcacaaatttcaataccgatggatttacggttgccgtccccgtttccgtcaccggcatgccagccgctttcgttcagcggaagatgctgataaatttccgtatcatcgactgtgaaatgccagcttgtcggtgtatcgggatttttcacatagcttgcgtgacttttggcgttagctccgactgcggtattggctgtattgtgcaccgtaatgtaaatcggtgtcattgcatagcctgggcggttattgtttcctgccgggataaaatcctgtgtgatttttaccatattctcatctctcctatttcgataaattgtttatttttaataaagcctgctgttttttcccttttgctgtaacgtaattgtttttaaaccaggcggcggcagtcgttatgattgtaaaaacggccgacccggcggcatacagcgtatctgcaagctggctgacctggtcctcctgaatattcagcggcgatttgccgaacatcagcaaagtttgattcaataaagcaagcaaaagaagcaccgtcctgacgaccgtgcctttgtccgcaaatttcatatcggtttcccccttacttttgcagcagattgtacatgatggcgatggctccgccaatgacgcccgtgcagattgctgtcacgatcgctcctgtaatggtccgcttaatccatgttgtgttttcgtcaattttgttcagtttttcgttcagcgtcatgatttgctgatcctgccggtcggatacccgctctaatacggccacccgctgttcaagcaccttttgttcacctttgatgcctgcgaattctttttgcaccgcttgttcatccagaagcacttcagctcccccctcttacattgttctcacctcccttcggaagcttcattcttacgaaaatgccgtgcctttgatagaaaggctcccgccggaaatgcttttgatttccatgacgatttccttaaagccggcaatatcaaatgaccacacttcttctgtgcctgacgtaccggcggctgatgtcccgtcatcagacttgattcctctgatcggcacgttttttcccgagatggatctcccccaaaacgcgacatggcccgactcagccgtgccggtgatttcgacgagaagttttttccaagcgcccgccgagaagatgcttccctcgcccgcctctgctgcattttcatgaaaaatcacgtctgtatatgaaaacgccatatcaccgcccgaaccgacagattggtataaaacaaattcggactgcttttgatttccgttttcaaaacggaaccggtaatatcgttttgtcaggcagacccaccccgaagcggtcagcactccgccttttactgcgacagaatgtgaagctgtccacgaattgttatcctcgctctcttcgataaaaagagttccgctgcggtccgaataagcccacccctgtgctctgtttattaagacggctcctaaacggtcttgtccgaattggctgtaaacttcaatcgcttctagcggcgtattggtaagaagctctgccattccggacaaatcagcaaccggtgtgacataatcgtttttgttaccgcgataagcttttactgcgccgggtctaccaagttgatcggcgggaaattcaaatgaatgctttttcatcggccgtcctccttttctcatttactaaaaatgacaaataaaaaaagccgtttggcttatgacacagcatttttataattttcgtatgtttcacccgttatttcttgaaattcctcaggcgtgatatacttcgcggccacaccttcagccagatcttcggcagagcagtcatcatagcccatagcctgttttaccatttctattgtggcccacttataaaacaaagcgtaaacccaaaagttaagtctcttcattttttcattctccttttacgtttaataattctaattttaaagacgctaattgcctgccgagtgactgctgcgcttgttcggctgcttttctggccaatttctcattcgccagctgtccgccgaggcctgcaagctggtttgaatcgggagccgtatctttttttaagctgtctttatatgcttcgtcagccgtttccacccattcttgtttctcttcatcaaaaaatgggcgccacatgccttcgccgtttatttccggaggaaagtccgcagcgttaggcggcatcatataatctcctgtctcagaatccggataaagctcaatcggagtgcctgtataaatgttgtcattgtcatacggaaatattaatttcatattctcgctcctttacgtgagtgccaaaacaaggtcaatataataaccgttcacgttattttctatattggccataattcccgtcagcttcatatctccattagaataaataataaatttgctgtaaccggtggtgccgctggctgcaaccatcgtcacaacgcctttggccggcgcacaagaggatggcacactcccgaataccacttctctgtccgtaagaacgtgtccgttcaggtgaagggtgtttcccactttgcggtattgaagcggcctgtctcctgatttagcgccatttttataaggaacatttatccaaggtacattctcagtatcaagttcagtaatgaggcgacgccagccctgccagcccaagttcaaatccaaatagttcgtgaacatattatttttataatcaacggcaatgacatatccaaacgttccctttccttcactgtcaagagaggtaaaatgaaacatgccgcgggtcgaagcgttgctcggactgtttgccgctttgccggttgagtaaaaggtgccgaacgccctgccgtttttaacgattttttcaagaaagttatcatcatcaccaattgtaagaagatagccgccgttatcgtttgttattttcgaaagctgtgcgccgttccagatatttttatccgcctgtgtgacatggatgtcttttttattagcgtgagcgtctacttttgcttgagagcctgcatctgtttctctttggctccattccgaccatacgcctttagtgctgaaacttcggacgtatatgggatttccggcggtcactgtgtctataaacatttggacaaacgtcggtgatgctccgcgggttctttgcattacaattaattgtccgtattccgcaggcttattttccgtatgctgaactgatatatagtagataccggacgtttttatattgtctaagtttgtttccgttaccgttttagcattcccgtcattgtcagtcagattgaataactgccctgcattccatttgtctttgtcagacttggttacatgaagatctgttttgtcggcatgctcatttacttttgcttgtgctccggcagctgtttcaaatggcatccattccgtccagatgccgtttttcagcgtttttctccaaaatcccccgtcatctgagaaagcggccgcctctccgttattctttgaagaataaaggtatataccctctgacggtttaggcggggtatttactccagttgcagccgctgagaaagtaaaggtcttattctggctggcagcggtctgatgaaaatcctgtccgtcagagatatcaataaaagcggagccattatcttttgtcattttagacaattgcccgttattccacttctggcgctcttccttcgtcacatgccggtccagatcttgattgtgctgatcaaaatctttctttgctgcctgctggacattgtctacgtttccgagaccgatttgcgcctttgtcgttttgtgcgggttgttcatgtcgtttttatgggccgccagatccgtgtgtgcgtcatttatgcctttttcccagcggttgacgtcatcttcgttaatcggatcgtccggaagccagtctgttttttcttcgtaagccatcgttacaccacctcaaaggtaaatcttaaatcaagcgttctgttattactgagatctaaatttgtttttcgttctgtgatgacgcttcctgtttcgtcaagcatctgcacggtttcaatgtgtttgacgtcttcttccctgcgtgtgagaacggtgactgcggcatcttttacggaaatgtccgcaatcggagtttcttttccgtttaacagcacttttgtgatcctgtttttcagatcggctgcggcacgctgtctgtaagcggctgatatcatggtaagaccacctcgttattgttgagtgtgacggaataaccgaccttcagttcactgacttttcggtatctccgattgttgagaatgacccggtctttgatttccagtgtttcgtttaatgcggctctcagtgtatacgccaaatgagcgggtttgattttttcaagcgtttcaatcagctcgttcatgtgctgcaggtcatcaagcccgatatcggcataaaaacgatactgccccggaaacatccgaacgtaagctgacggatgttttaaaaaacggtttagcgcctgctcgatcgcttgatgtgtgatgggcggaatattcgacatcttggaaatcagcctgagccgtctcatatcctccgtgtcacctgattcccgcggtatttttaatattttttcccagcggtcaagcccccacgtcgccgtcgtgataaagagctgatctgtcaaatcgaaaatatcgttattctgccgctcaaactcaggagcttccgcctcaagcagttgtgccatctcctttaatcgggttaaaaacggcgggaggtacgccgtcatctcatcgagtctgctcaaggattgtcacctctttgagtttaggaatttccacgtcactgagcacgaggttttccgccgcaccgttcattttgatatcggcgtagtcactgacggatgccgagttataaacgatgttgtttatttgtgataaacggacggtgttttcttcgaaggccattttcttaaataaattcaggacgcctttttcaatctccgctttcacgtcatcgatcgagctgttcagctcaggcagcacggaagcggagatttcgatttccttccatacggcgctttccaccgttactgccgctccgatcggcgcctgtccttctccctgcccttcgtccggatcaatataatcctttactttcttgatcagaatatttgatgccggttccaaattcgcatttgtgatgacaaccttcaccgttccggctccgttccaaagcggaaagattttcgccctgccgacgccgtcaacctcttcggcccattgtttataatgctgtttatttgcgctgactgcctcccggcggacacgggtaaaatagcgcgtccttaagctgctgtcatcttcttcttcacggccgggaattaatatatcgcccatgaccgctttctcaagcccgggaatcgtatcaagcggcagcagattttgacctgtaatgccggcattgcccgcttctccggccgtttcacactcgagcgttccatcctccgtatattgaaaatacaggttatcaacgaagaaacgggagcctggcggaatggtgatgcccgctgtgaattctccggctctgaccgcttttgtggcaggtgttcgttcaattcccgcttcagcagcccgcctgtccagaaattctccctgagccgtatcggaaaacacgagctccagcacggtatcaagccaaatataagactttgcgagctcagcggccgcaggcgcgagcgcattgtaaatgacgctgccttctctcgtatcaatatctgccgtaatgcgcgccagcattctgtccataatgtcgtcaaacgtctgagcttcaaacatcctcacccagcacctcctctatctcaagcatgccctcatcagtttcaacggtaaaagagacggtgaaggcatcatcttttttctcaatctcaaaattggtaacagccaaaatacggtcatcatacagcaaggcttcttctatcagtcttggaatctccatttttttataagcatccgtcgtgttctgatctgaaagcacttcctgaagttcgtttccaatatcatggctgaaaaccgaatatgaataccgttctgtgtgaagagcgatatagacgaattgtctgattgcgtccagtccgtttatcagttcattggtaatccggttgttttcaaaatcaattcggtaggtttgtgaagtctcaacggcctcactcgcatcctccaaatcttcaaattcgatttccggtgtcagggccattgcacccgctccttttagatttgatcatgtaaaaaagccctcttcggatgatgaagcggctttaataggctgatattctggtacagttccgtccgaatgccggttaaattttgtccagtacaaagaaagactgtcctcctgttaaagcggcggtcatcacccgatctcccgcctggagctgatcatcttctccggatctcagccgcttcggtacaatgagtgcatcagacggaatcaaaagtttgtcgtgatctttcagtttcagctcgagcggcgaaacggaggtcacttcggccggcatcagctccaccggcgcttcggcgtcaaccgctccgacggctaaatgtttaatggcatcacttaatctcatcaggatgtcccctccggaagtgaatttttctccgtgacgtcaatcgtcatggtatgttttgttccttggaattcatggcggtccgtatctacataataggttttcttcagcccgatttccggaattgagatatagacaggcaatccgctttccaacccaggaataccgatcgcctgtatatttttcagctctttcttaacgccttttttctcagcctgcttcacttttgcgcgctgtttcagctgggcttcattaatgtcgtcagaaaccgtttcggtatactgcaaaacgccgaatgttttcatgcccgcgctgtctgacgcggaagcctttatcgttttattgtctttttgcagccgcatgacgacacgggttgcggtgtcatcaattgaggtgctgtattgataccctgtgatattaactcctgtttccagcacccatatgtcagacggctccggccattcacgcaagccgagcctgcctttttctgaatagagctgataattgcgccccgtctggctttttgtctgctttaacgcttttagcatcatatcgtaaaggcttgtatcatttttaaaaacgagtgatttaatggtatggcctgtgttggcaatggatgtgacgggaatttgaaaatcgctggcgatccttttcaatatttgatcggcgcgcttgttggaaaacacgtaaacgtcctggtttttcacaaggtattgaagcatatcgtatgcggtgaaggcgatggtttgctcatcgggcgttcttgcaaagacaatgccgcggaatagttcttttccgttccatttgaacaaaaccgtatccccctctgatacaccgtaatacgtctggctgccctgctttacgacaatcgtcgcttcgatggagcggggcgcctgatatctgtgtccttccagcgttacgctttctgtgacaagctcgagccactccgtttcttttatgacaaatagttcaatcatcttttcacccgtttcattgcggtatcttcagcttctgccccgggaagatccaatgccccggctgccggatattccttttgctgcgcttaatcatggcggttttattcgcgttccagattttccgccactccgtgtgttttccgtaaaacttaccggcgatgtcccaaagcgtatccccttttttgacggtatatgttttgggtgaaactttggacgggcgcttcactttcgtttttttcttttgtttgatttttcttggcgaagcggttttatattcttttagtacgatatcaaaattccggtcgccgatttcattgtcaccttcgctgtaattgaagctttcaatgctgcatgtgacattaacttttgttcctgtaatcaaaaactgaacgggttttttcgctttcatccatgcttcaatggctgaaatggctttttccggcgaagggatgctttgatattcggcaatcgggctgtaccgtttcggaaaaaaagaagagaacgaaatttctttcgctcccagttcttcgataaacgtcacctctccaagtccggtgactttcacggaatcattctgcacgctgtttgcgatatcaatcgcttcagggagaacgggaagccggagcttgtccttcccctgagacagccaaaattcgtaaacagatttagtcaaaagcaacggccccctttgctccggtataaatgtctttttgcagttcatcaatcagcgcctgtttgattttggcggcgaggctgtcggcgtcctgtccgttatggaaatgctgatcgccgctgaattcgattttaatttcttttgttcccattttttgaacggtttgtccgccgcctttaacggctgcggaaaccgtgccggctgaaagcgccgccggttccgtctgggacggatcggacacttccatgccgagcgcttgagcggcttgttgcagcagataacggccgcggatgccccgctcttcagggatgatccactcccgtttgttcccttcgccgacacgggcgatctgctccttggtaatcagacccccattggcataaccgacgtaagggcctccatgagccatacttttaatcccggggacattgctgatcgagccgtatcggcttttaatatagccgatagcggcagcggcgttgtgaattggatttctgatatcattcatgcccggcgctttgtgatcttcaaaggtgctcggaatcgtctgcataagcccctgtgacgggtgtccggctttggcgttgctgtcccatagattaatggaattagggttgccgcctgactcatactgtgcgatcgtcattaatcccggaagccagctgatcggcgtattggttgctttcattgcggccaaaagccactctttgacgcttcctcccgctgcacccatgccggaaaaggctgctgcaagcgagcctgcctgtttttcggcgtattttttcacgtcaactgagccgagccctttgacgacgccgactgaagcaaagcgcccgaggctcatcatgacacgggaaggagagtgaatatcaagctcttccctgaatgcgtcctcgacttttttggccatatctttggccgcctgtttgacttcgcttccttttgcagtcatccctgatacgaagtgtccgatcaggcctgacccccagccgttcgcggaatctcttgattgcacaaacggtttattgatatgtgtgcttacgtattgcgacgttcccgtatcttttgcattctgtccggccgaatatcctttcaccgttgcggcgccccatgatgacgattgattaaccgccgattgataaggtgttttcaccttcgtttttaaaaatgaatcggtgcccgtcggtgaagtattctgacctttggcatagcccgcaacgacttgctttccgtaaccggatgaagacgaaatgagggtattgaacggcgctccgatgtttttttccttccagccgtccatatccaccgcttttttgctgattccgctgtcaaagccttcagtaaactgtttgccgagtgatgaagccgtcccggcaaatccggaagaatccacagacgctgcggccgatacagatgcagaagaagaaacaccgcccgctcccgccggtgcagcggaagactgggccgaagccgcgcccatatcatcgacaacacgcatgccgagcttagacgcagcttgtgaaagcagcatctttccgcgtccgcgattgttgtcaacgggaatgacaaattctttaccggcttcaccgatccaggaaatggtcggctttgtaatgtagccgcccgtggcgtttttgtccgttttctttttatctccgccgcctcctgtgacaaagttcattatgcctgaaatcattttgccgccggttttatcccaaatctttttcacccagtcgaatgctgcagaaaaagcatctgatatggccgttcccacttttacaagaggttcttttatatgtttctcaaaccagccgcttaaccctttccatatattctttaccgtatctaaagcagtctggaaagcatctgatattcctttaccgacatttttcaccatgtctttcaccggattccagacagtatccatgaaccagccggaaaccgtactgaaaacagatttaattttatcccaagctcctgtgattttactccaaatggacgtcgccactccgacgacagccgattttacgggcccccataccgtgctcataaaccagccggatactgtgctgaagacaccttgaatcgtcgtccacgcattcacgatatttgaccagatgctggttgccactccgacgacagccgatgaaaccggcgtccatacattttccatgaaccaggatgacaccgtgctgaaaatcccttgaatcgtcgtccacgcattcacaatatttgaccagatgcttgtcgccactccgacgacagccgatgaaaccggcgtccatacattttccatgaaccaggatgaaacgcttccccaagtatcttgtattgttgtccaagcactttgcgccgctttggaaatatcattccacgtgtctttcaaagctcctgaatcaaaggcctctcccaagctggaaccgcctaaactgccggcgatgccgcctaccgcgccgccgattaatgtgcctactccgggaacaacgctgccgattgccgctccggccgcggctccggcaagaccgccgcctgctgagccgaccttctctcctgcattatctttattgatgccggctaaatcagtaagtgataacaattcacctatgccgggaattcctttagcggcaccttttaaccctttcataccgccttttagcgcctttgaatctcccaagcctttcaaaagcgcgccgatgcctttacctgccccttttgttttcggcgtgtttacggatgcctgtttgctttcctttacggaggaacctcttttcgaggatttatttcgcccttcgactgtactgctattgcccctcgtcactccggtacagcagcagcagccccccaaagccccgccagttttttttgctgactttcctgaagattttggcgctgttaccgtgcgctgtgaaccctttgtcagatcaggacgcttcgggccgttggagccgccggcagtaaggccgcccttactcttttcttttttcgtgccgcctcctaataatccgccgatattgagtttgcctaatttttcagcgattcctgataatattttttctattaattccccggctttttcgatgattttgtccgggctgaatttctcaaatttcttggcaatcttgctgacaattttatcaacaaatgcctcggctttttcgatgatcgcatcaggactgaatttgccgaactttttatcaatgcctccgaacagtgaggatgtaaactgctccactttttccaaaatcttatccggattgagaaaatcgaatttctcagaaattcggtcaatcgtgtcatttacaaattgttcggcgcggtcgattagcttatcaggactgaatttgccgacaacgtcgtcgactttcttcataaacgaatcagtaaaatgatccagctctttcaatatggtctccggactgaatttgctgacaacgtcatctatctttttcataaatgaatcagtgaatttatccagttctttcaatatggtctccggactgaatttactcacaaccccgtctacctttttcataaatgaatcagcgaatttatccagctctgctaaaatcgtctccgggctgaatttgcttgcgatttcgtccacttttcccatgaatgatgttgtgaacttgtccagttcggctaatatcgttgccgggctgaatttgcttgcgatctcatccacttttcccatgaatgaggtcgtgaacttgtccagttcggctaatatcgtctccgggctgaatttgcttgcgatctcgtccacttttcccaagaatgacgttgtgaacttatccagttcggttaaaatcgttgccggactgaatttgctcgcgatctcgtccacttttcccatgaatgacgttgtgaacttatccagctctgccaaaatcgttgccgggctgaatttgcttgcgatttcgtccgcttttcccatgaatgatgttgtgaacttgtccagttcggctaatatcgttgccgggctgaatttgcttgcgatctcatccacttttcccatgaatgaggtcgtgaacttatcgagttctgctaatatcgtttgcgggctgaatttgcttgcgatttcgtccgctttcttcataaagcttgcagcgaatttatccagttccgctatgattgtttccggataaaatttggatgcgatgtcattgacttttttcatgaaggtgtctgcaatggagtcaagcattgaaaaatcgtttttcggcgaagcaggagcagcagatacagaagcttttccgacgtccggcatattcttttgcattgcagccagctgtgctgtcaccttttcgtttaacgataattgaatgacattgttttttcccgtcagcgaatcaatgcccgctgaaattcggccgactgttttcatgacgtgatctatgacgcgtatagtgacagagtacccgttctttaacgcagattgcatatagcgtttgatacgttccatggcaggggtcacttcgtctgacgcatacagtgaaacggtaaatcctttaaaaccggcagccagatcccgcaatctctcaaatgccgctgtcgcgctgtcttttgctcctattttaatggttaaagacgcaggcagatccgctaattgggcttgcaccttttgaatgacggcactggctccgtcttcagctgaaatagagatcatttgtgcgcccagctttcttttcatagagcgctgaatgcggtcaattgttcttaaaacagatttactctctttgcgtatatcaatttcactttggcgttttgtcattttcctgtatttctcaagcgctctgaagccattttggattttccttattttctttgaaacccgatcttccaattcaaaacgggcggtcagctttgccatgatgtcgctccccctttcttcgcttgtttttcaagaatgtccagcttgtaaccgattaaaccgtacaacagcgccttaaaatgtctcggtgcttcatataactctttcagttctgatggagaataatgaagctcatgcatcgcgtaatagagatacacggcttccttattcccatcttttatcagttttttgcttcttgctccagatcttctaattcatcttcaaaaccattgatctcaatcgctttattcagccaatttgcatactcaccgccgactgaaagcacgcgttttgccacctcgaccggatctgccgttttgtaagcgtcgcggagctccttagaccggaaatcagggtaaatcgtagattcaaccgcgatccgcgcataaaagcgctggctgtctaagtcttttactcggcctctgcccttcacatttttatatgtcgtgctttccttctccagttcatcaatgcgctcagtcgtaatggctttaaaaataaaaggcacgatgtttccttttttatcgacaaaacgctttgaaagcggaacccgaatctcctcagcctcgactgttttacccggcataaagaatgatagatcatatacttgttcgtttttttcgctcatgatgaaaactcccttactcttttttttataaaaaacaggcctgtaaaaaggcctgtttcactcataccgatcttaattaaaacgtttcagaaagcttttccggcacatcgaaatcttcaaaggtaaacggcacttcttcttcgagtgcttctgagtctacgtccagtccggcgatttttgcagaatcaaagttgacgtcatacagagtaacgcgttctgttccccggcccgatgatttgtcatcaagaacggcttgcagcgtaaaatacgggtcgctgccttttttgacgtaatccatcataaggactgcgaatttggatgtgaccttatagaatgttgccgtgcccgttccgttggcgcctgttgttttatgtcccgtcatgcggcggcccatgatgtttacttctgatttgtttttttccacgtttgcttcaaacgttttaatatgcgccatctcttctccgtcgagaaataaacggccttcttttcctgaaatcgtgttttgcgcttttaatgccatcttagtttacctccacgttaaagtagaatttttctgccgcatccacaggctgtacggcgagatcgattaaaaagccgtcgcggtcttcattcagcccgattgtaatgtctgtatctgagtcaaaatttgcgatgccgcccgcatcctgaagcgtagtcaaatattgaatgatcatcgttttgacgaattgaaggccgtcatttgtcgcaggaagatcgctgcccgtgccttttttcgatttaattaaggctttcagttctcttgtcaaatcgttattcaccgcatcaagcacacggacgattttgtttttcgcgaactttttgtttttctctgccgtaaatgtcaccaatgagttgatatctttttcaacgctgactgacttatcacgggcatcataagagaaaaggaattcacctttggaaagacgttcgatcacttcatcatgagtcaggcggtgcagcacatcgacggcgccttcgtattcaacgaatgttaaggattgattaaatgcggcgctggcacttgcgcctgccacccaggcggtcgcatcttcagctttaatctcggttccgtcttccagcagcacaccttcagtaacattgataatgccttcataatccccgctgtaatgggcggtcaccccttgcactttctgtccctgcgcatcgcgaaggcgtttaatgaatgcggcaaatgtcgctttcagctgatcgttttccgcgacaggaagagcgatgacatcgaaattctccgtttcagcagcagctaaaaaatccgtatagtctgagttgaccggtgctttatcagttccgcccgcgagacggatgcctgcctgcgggtttaacttttccccggattcttcctcagtgcctgtcagcgggatggaagccgacagttcgcccgttcccgtaaatgtgacatagccgtttgcttttaattcttcggcttttttcaccgtttgtttgtcaacttccgcttcatccatgtaagtggtcacatcgaaagcggtctgatcaaggacgttttcactgatgcggatgatgatgtcatttccttttgaaccgccgtacaaagcggttgctttaacaccttgtgaaagatcggcgctcgctctgattccctctgtcagacggtacatcaaaacggtttttgctttctttttcgcctcacgaagcagaatcagtgacggatcttcaatactgagccccacttttttattcaaatcttcaatgcttgaaatggaaacgaatgttttcgcttccccccagccggatgcgacgggaagggcgacaatcccgcgttcaccgatcgatacccgctcctgggcggttgttttaaagttaaaatagatcccggcacgttctttttcttttccttgcgtaaatgttccgccgttcattattgcatgacctccttggttaaaaatgcttcaatgtaagacttagcttgcgcttttgtcatttgtttttgcttcacgccgaataaagcaccctggagaatctcgggttttacgccgaaaagctccttcgcgtgctttgttaaatccgccgtgtcataaagaaccgctcgttccgccgctgcggcgtttttctttttatattgtttcacttttctttcaccccgctgttaatgtccacatcccgcagtgcgggagatgtttgtttctgatagtagtagcggctcgtccagcggattgtgatcactgcctcgcctttgtctccgactcttgtttcgatacggctgatgcggacgaaatcaccggtatcctcccctgattccgtaagcagcggaatcagctgtcttgattctctcaccgcatcggcgatccggtcggctgcatagagcgcctgcaccgagtcggcatggaacagcttcacattcagactgtatgtcttcttaaaggtggagactgtgtcattctcgtcaaaaacatacgggggcggaatgtatagtgacggcacctgaaattgttcaggcagttcattttcatatacgggcacgccgcactgctgatacaaaaaagcggcgattgaaccggtttcgcgattcatccgatatctccccccaacgtgttaagccactgattgaaacgcttgtccagcgattcggcgaagagtgtttcatacaaaagaagggctttgtcccaaaacccattcccgctgatccactgttttttgagcgccattcccgttgaagctgacggatcatagatgaaccgggagccttgaaaatatccgggcacccatctgacattttcatctgagacggtccaatgtccgtcatttatgaatgaggcatactctacattggtgccgatttcaagggtcagtcccccgttttcaatgatccatacatgatcctgcgctccttttcggaaagaagacagcaggttttctgtatcaattcctcccgaatgaataagctcctcccgtaccatgtcgagaaaatcctctcctgactgttccagccattcgcctgcctgacgggcaaattctccggatgatgccttttgcagcgaccgattccattgttcaaggttttttatgctcatagtctgtcatctctcacagcgataacctcccaatggtgctgtcttgctttcttcggcatttccagaatatacgcctgtccttcccaaatgattttgtcattgacacgcacagcggcctctttcggaaaatgaacgagaaaccgctgatataccttatgatcaggcgcaagctgaataagctgctgctgtttttcaacaaacagacacggcacgtcttcagcatcgggcacttccggataagaaaagacaggctggagcttttcggcgggaatcccgaagcgtccggccttcggaactgacaccgtctcatgataaatatcgcatctgtcagtgagcagcccttcgtagctcataaaggtctcacctttgcgtttgcagaaaccggggaataacccggcgcgatatattcacagagcagatggtgcaccgccggttttctgattccgccttcacctgccaccgtatacgagtagccgcctatcttttcagattgataggcggaagcggctgcttcattctggttgatcagcgcaaaatattgagaaagctttaataacgcaagcttaatcttttcgggaagcggtgagtaaatagggtcagtgaacgaatgccccgccattcttgccgcttccgcctccgcctccagaatgtcctgtataagaagcggctccggcctgtttttgacttgatcataaactgaatatgaaacaacgtcagacggctgaattaacataactgccacccccgtcttattctttaacgtttacgattttggcgcttgcatcttcttcttcaaatttgctgtcaagtttagccgtcagtacgataataaatttgcggctgcgaatatctttatctacttcgattcggatattccgtgaaaaaccgagaatgatattttttgggtgagtcaaaatgatgtcagacgcatcgtattgggagtcaccttctccgaccgagtacggctgcagattggacactcctttgaccggaacgccgaatgctgaagacaaaccgccctgcaccgcaagatcccccaggttggtctgacggtcagccacacggtctttccattcaatctccatgccttgagatgtgtaaaatctgaattcctgaggcaggcgcaaatattttgccggaatggcttttaagccttttttaaatgtggctctggacagctcttccccgtttccgtcaatgacgtgagatacagtctgcttacggattccgtcaagctgtgccaagtacggatcagaagaagatgtatcgccgtttacgacaagctcctcaatatcgactgccgcccgctccgccaaaatctgcatgatcgtctgctgcaggccgtctttttctatattgttttcaagcgtgtcataggtgatattaatttccgcaatgacttctttcgtattcagctgcaccgtacttgttgccgggacggtcagctgatcgtcagttaaggcttttccttcctcagcggcacgcagaatccgctggccgaaaccgattttttcaaatttctgcgagtcattttccatttgaatcacacgcgattcgctgaaaatggtcggcgtgttctgcaccatgcggataaatgctgaagcttgtgcggggttcattaaaccgccgctttttaaagcggaaagtgacatttccgcctttctgatgatatcttgatttctcactctacagttcctccttctgactgggcttaaagcagtccgctccaaatggattttttaacaggctcttggccgcccgtctcttcttccggctgctttgatgcgcctcttactttttcaagcgcttcaatgcgtttaataatcggggcgagcatgtcctcaacaagcgttttcagcttttcttcatcagacggcgcagccgccccgtctttgtcttccgtgttttggtccaagctgtcaagccgctttaaaagcgggtgcagcgcgtgttcaatcgattctcttacgtcttcttttctcatcttgttcaagtcctctcccttgcggtttcttgatttgcggtcacggtcgagaaattgcttgaccgcgccgaataagccggcttgcttttctgccggctcttcgtaaacgtcagcggttcccgccatgctgtagcccgtaatgataccggctttaatctgatcccatacttcatcggaagctttggtgacaagcacccaagatcctttccggatcacagcattcccgatttcaaagtcatccggagcgacgtacgactctaccacctcgccggtcccgccttcaaaattatgatttgtatcgatgttgcgggcgtccgccaaaaaaccgtgggcggccttttcaatctcttcagccgtcatataatcaccatgggcatccgggacatccggctcgtaaacgatgccgtaaacaagcttctgctcatccgattcgttttttgtaaacacctgcacctttttttcaaatgacggaaggcctccggctgattttgtaaaaaagaattccgtttggttcgccgccttatcgacatagctcacaaaactgatgacggcatttctcaattctctcggcacgagatgttttcaccccctttcaggattgctcctttttccctttcagcaccggccggctgtagtactcttcaggccattcctcaagcgtcttgccgagcactcttccggccagatcacggaggtcattaggagagaccgcgccggcggaaataaatggcgtaagcaccttcgcaatttcaagcggatcgcgaaaatcaggcccttttaatgtgagctgtacatcgtggagacccagttcaggcaaaaataacgtgttgagcttattaatcagcgttttccgctccggctgaaacacctgctcctccgttattttccgtgccgtatcggcggtggctttgttgtattcctgcgcctcgcccgtataaagcggcgggagacggaaagcggaacggagtttatttctgcttttgtcgtcatattcaagaaacagcgcatcatcctgcagaatttccgcaagtgatttaatttccacagacacgggcgtaatgtcttcgcctccgtgaaggtctttttccttcgcaatgccttccgcctcaatcagcagaaacttgtgggcgttttccaccccttccaggtcattcatataatcctggagctctttgtacgatgcttctgacagcatgccgttttcaaccgtaatggcggccggcacgtgacggccctgcttgaaatacataaaattcagttcttccgctttccgggcgccgtacagattgacgatattgccgacccagcgcggaattccgtaagtgccgctgccgatttttaagtgaatggcttcatttgcccggtattcttcagacagggtctttacgtattcgccggttctcatgtccatcatgcgggggtcgccgtattccttaaaaaacactttccgaccgttcagcatctgaacatatttacggaaccgtttttgccttttaatcgttttggatgcgccgttttcttcatatgaaaatgtgacttcaacgggatcagtcacaccgcacacgcgcatatgtttcacatccagatattcaatccccgctggttttcccgccccgtcccgaagcacttcgagaaaaccgttgcccgttttttcacggtcttctatcgcatatccgaggatcgtctcggccgattcatcaaaatgaagacatttgtaaaagctctccagcttcatccagtttttttcggcccgggccttttttgacggggagcaatccgggctatttacatcaaaggtatattccacatcaaacccaaaacccgtaatattgacccgatacgcgtcaatgcactgctgaagaatcgtcgagtattcggcgattgttttcagttcaatgagattatagggcggtgaaatgatgtcttcgccgtacagatcggcaaattgatcttcgttcatctgccttgcctgcggcgcggccatttttgatttaaagacggtggctctaacgttttgatagttcggcaacgcctacctcctcctttcccgattcggacgtcttcgtttttgtgatgcatctttcagatccgccgcgtcatagtcatccagcgcataccaaatggctgaaagtgtgtggggatcaattgaaaactcatcttccgacagagcgccgtttttgttttttgcgtacgttaagttctgcaattcgcggatcgtatgttgacagctgtctgagcaatagatgtgtttgaaccgtttcagtttttttgtatactgaagtcttgagcccggaaactttttggccgcaaccatgcaaaagccctgcctgcgaaaatattggatgcttttcggctcagccgaatccgctttgatcagctctttttgatccgccaattcctgaagctcctcagctgtctgatcatcggtcattttgtttttgtaatactcccagaaaatataaagctctttttgatccggatcgacggcaagccggatgaccgcattgtatgactcttcaaaaccgaaatccatgccggtccgaaacagggggcgcctgatggaagcaatccgctccgttacttcgttgtgctccatgacctgaaactgcggaaacacgcggatgccattgacgccgaactgtcctttgcgggcgatccggtataaatcgggatcgtaatgccgtaaactgtccagctgcttaatatagcttttcggcaaaaacagattatcgcacgctgtggaatggtggtaatacgtatctcccttaacgacggtgcctttttcatacagcgtctgatcatccaatacgaaccgttttttttgatcatcacgaaaaaaatgccggtacgtccaattggaggtgccgacgggattggtggtgcatatcatatgaagcgaaaactcgggatggcgcagacgcccgatcagctccttaaagccttcatacttcacttcagagcattcttcaatccaaatcagggaaatatgatgaatggatttcaatttggccgggttgtccatccctttaaacataatccggcttccgtttgaaaatctcagctgcatcggtgaagacacggcctttacggcatgtcccagctcaagctccccgataatatcttcaaacaaggcaaaagtagaatctctgtgcgtatcgaaaacttcccgcacgacaagcgccgtccgcttttcacgaagcagcttcaggatgattttcagcgcggtatgatagctttttgacgagccgtagcctccgacgagaaattggtacgtttcattccaattgaacaaataatcttcaaagcgcgggttgaccgctttttcaatcatgaccgttcctctttccgcgtaatgacaatgtcaatcggcttttggctgtcttctgttttttccatcttctgctgtgccagctttaatttttcattttcgattttttgtttaaattgatcagggaaaaggtcaaagtacaaggacagcttttcaagagccttcatcttgtcggcaagctttattgcaatgccctcttttccgagttttgcttctgtgacgatggttccgtccagaaggtgcgaatctttaacgtcaacgtagctgatttcctgcataatcggcttatcattttcgtcaaagagcggccctgattttccgaaggcctgaacctctttttttccgaaggttacataatcggtaatgtcggcgaaagcgattttcacatagacttgaagaacgtccatcgcttcgacaaacactttattgaccatttcctttttcatgcggctgatttctttggcgactttttcgttttttaacagcctgcttcccgtcacatgcgcgctttccggtgaatagccggcttttatcgcagattgggtggcgttaaagcttttcacataataaagacaaaacagccgctggcgttcgtttaactcatcaccttcgcccgggttgttttttccgccgctttccgcgttcttatgaagcgcctcgtcccagcgcccttcttttttccatctgccgatcgttcttgcggatacgcctgatttgccggcaagggcgcgatttgtgatgcggcctttatgagactgatagattgtaaatgcctgttttctttttgcgtttttcatgctacggcatcaccgccacctccgacatgattgtctataataaaaagcggcttctaatcgggccgctttttgtgatcgtctgttcacttctaggtggcaaacgtatgacaacttatgaagcaggcgattgatttctttgttcctgctgtttttgtattttcagaagcgcccgtttgaccgtcgtctgtacggttgatttctttacattcagcaaggcggcgatccgttcatatgaaaagcattccgctttgtggagcagcagcatttctttttctctatccgttaaaacggctaatgcgtcccgcagtctgattctgtcttcttcagtcacatttgcggaaggttcaaacatcagcgcctgcgaataggtttctataattctcggatctttaatcagcattctctgataagcgtctctgcggtctatcgctcttcttatgccgggctgccggcctttttcaagccattcgatgacatattccacatctgtaatgatcgttctgatgatttttttatctttcagttcttctgaagtaagcaccgtttcatcggcttcctccagctgcttgtaccactttttcgtctctttcagcgtgcgtttatattcaaatagtaagtcttccatgcagatcctcctctttttcggaacaaaaaaaggacaccaaccaatgcgcagcatgtacgcgattgatcagtgtccgcaggctttccgtcttggacgtattctgtttttttcgattaattcaatttaaagccgatttcatattcgacccgggccagatccccttttcgcgtttcgacaagcgttttgccgtgctccggcgcttcggcgagccatgcttccttcttcagtccgtctacaataatcacccgaaccttgccttcttccagctggctttgtaatgttgtatgttcaatgtcagtcagttttttaggattcatgttttacgtcctccgtttttttcaggatgtttacttcatgtatgaggcttccgagctcatttatgaacgcttctttttcttcagaactttctccccggagcaggcggagagccgtttcggccgcctcaaaaagttccggagcctttgccatcaatgccgcgttgatctgctgagagtatgaacttaagttgaaaacggccgcgatgagccttccgtttgaataagggaacttctctttatccgcttcgctgtaagcggaataaatgtaaatgggtttttcttctccgctgtgtacggcccgccatggagcggggctgtgtttttcttgcaatggttatcctcactttccatcagcctcatgccatgcttcaatttgcttttctatccgtttcgccctgaacagcaggcaaaaaagccatttaatatatttatacacgtgcatcaagcctcgcttttgcgtcttgaaccattcgctcaagacgtttaatgaccggcgttaaatcagtgcctgttttgcagttcgggcaagggtgaaagacagcgccgaaacccgtttccgtcacaatgaccttcttcggcccgcacagcttacacattatctcgccccctctaatctgtggtttacgtcaaatgaattgccattaatgatgactaaataatcgctgcacatctcataaattcttgtgcccaaggcttcatcaacctgcaccagcccgtcacaggccagctcgctcgagataagaaccggcttatgatttaaataacggtaattcacgacggcgtacatttgttcaatctgccaatcggtcgcccggggttttccattcagcggtttgaacagatcgtcaataaaaagcacatccgcctgtttcatacggccaagctttgcatcaagcagatcaaaatcattttttaaatccgtaaagccctccacaaaaggaaaatacagcacgggtgtctgcatctgtctcatgacataattgctgagagcggtcaaaagatgggtttttcccgaccccggacgccctaaaagggcaatgctgtttttccggcagtttttaatcttgtcgaagttttcaacatattcaagggcgcactcatatgcgtcgacgactgcctgaggcttgccccgcgtgataaatcctttgaagtccagcttccgaaaggcgcctgtaatctcacttgcgctgaggatgcgctctgcttttcgttcggcggcgcagcggcacttaacccacacatccattcccagctggtttttgagataaccgccctgatctttacagagcggacagtcaaagcggctttcgtctgattcttccggtctgtccgccagtaatggacgttttccgtttttcaggtcggccagtatctgctcgatcgttcgttttgtcatgtatcgtattcctctctttttttgttgtgattgtccttcccgcaattcgtgcattcaagcggtcttccatatacttggcgcaatagctgaaagccttgatcgtttcagctgaagaggtgcgccgctgttcaaaagcggtaaagcattcgccgagccatttgattgcttcttgtgctgacgcaccgagggaaacaatacgggcgatggcctgataatcccggggcgacgggtatacgctccgcccctcctgtgcagaccttaatctgataaaatgggcggcaatgtcgttaatcgcttcttcagcagtatgattttttgttatatctatttctctccggacatttttgtcccggtgatccgccgatattgtccggtcagttgcttccgggcgggtcaatgtctttttcggcgtgaatcttttcgagtgctttacggagacgatgagtccgtaaggggcgcggacggttttgatatattcatgctgttccaaaacctcaagccaccgtctgacggttttttcgctgacggcaaatacatcggccatctctcttgcttttacgggcttatgaccaaggacgatcccccactttacaccgtcttttacgtgttcctttgtcgttgagctgatgaaccataaaaacagccaaatagcagaccctattttgtcataatgttctgaattcaataatccggaatagatgaaaaacgggtagcttttacgattcataagggacgtctccgtttgtcttcagacctatatagcgttcatactgcaatcggttatcaaatcggaataccggaagtccgcaagcggtaaaagatatcgaaccgcctgcttttcctaaacatctctggtcagccggattgctgctgaaacggatgattatcggcttcatctctcaccctcctgatcaatttcttatcgtattttgatacatttcgtatccctatgatgttgattatatacgatacctttcgtatcatcaagacctttttgatactttttttatcatctctttattttgatacattttgtatctataatcataagtaacttagggtgttgaaaaaagagaggtcattcggatgataggcggaagattaaagaatctcagaggaaagaaaacacaggaagaagtcgcaaatcatatcggtgtctcgcgcgccagatattctcattatgaaaacggccgatctgaacccgattacgacacgctgcaaaagcttgcggattatttcaaagtgtcgactgattatttgttaaccggaaaagaaccttcagatgaagacatgtttgccgatcccgacctgcagatcgcatatcgggacatgcaggacttttctccggaaagcaagcagcaggcaattgaattcattaattatttaaaagaaaaagagaaaaaccgcaggccgaaacataaataatccgctcttttcctttaaactgcttaacgttcagccgatataaaagctgaatgtttatttttaaaagaaaagggaattgattcaaagtccgatcagggcttttctttctcacttaaaaaagaacatacgttcgaaagggtgtattcaattgggcgattttttaacacatcttgaggaatacgtcaaaaacttatattgccgcatgggaatgaccgcccctctccatattgatatgcagatgattgccaaggagcttgacatttggattcattttgaagatacgcacagtatgatgctgaagcgggacggcatgtacagcatcgtcctgaatcaaaaaaagtcacccgaagagcaatggcaggattttgcgcacgaactgtgccatgtactgaagcataccggcaaccattttcatatgaacaagctgttcagggaactgcaggaatttcaggccaaccattttatgtaccacttctgtgtgccgacctttatgctgttaaacatggagcttccccaacggagaagccatgccgttattttaatcgcagccgctttccgggtgacggcatcatttgcggaaaaaaggctggagctgtttgaacggcgtaaagcaggtattcaatttcagaagcggctcgcttgtctgttatccgacaagcggccgaatgtgtattatgaaagcggacagacacacttgcatgccgctgaagaaaaaacgccgtattttattgaaaattagcgatactccgcggcttggaacgcagccggcagaatgtcatcattttcacatcgcaggaaaggtttttgcatcatgacgctgttctcaccgtgctgcccgccacgcacttcttgcgccgcatagcagctccagtaaatataagaacgggccccctgttcatttatcataaaaaccggccttcacggcttctacataccgaaaaaacagatcggttggcgtatatttttctccccggcagccaaaattgctgaacagcgcgtgtctctgcgccgtgctcacttccaattgcagccccattttcctttttgtccgattgacaatgttgcggggatttacacctgccagccgatcattcttctctgtcagctcggcatcaaaccccgcttcacgcagcagatcacaaatcagtcttgctttttccagatccgcgcccccgacgagtgtatttgcctttttcagatcatgatacccatgaaaagccaatccgtaatgatgggcggtcactttttctaaagccaggggttcgtcaaagcgtgtgcttgtcaaatggagagaacggttatcgcaccgcttcgttccttcaaataaataaattgagctttggtcagaaaatgcccgcaccagctcactgacacccggctcaatcctgccgccgtggggagcgaggacgatacatttacttccctctttttcttcataaataattctgtattccgattcagcagcagaaagggctgcgaaattatcatatctatctttcatgtgtaacatgctccttttccagtcagcaccagtttactctactcatctgggaattggaaacctttttatagtatgatttgatagaatacgtatcaggggggatatatcatggggttcatcaatggattgctgggcaatgcgtcgacaatatcgacggctgaagcaaaagcagaactggctcgtattctgctggcaggtgagaatgtcaacgccgcatttaagcttgtccgagatatcattgtctttacggataagcgtcttattcttgttgataaacagggactcacagggaagaaaacggagattcaatccattccgtacaagagcatttccagattcagcgtagaaaccgccggccgctttgaccttgattcagagctgaaaatttggatttcaggcgcggaacttcccgctgtctcaaagcagtttaaaaaagatgaaagcatttatgatattcaaaaggcccttgccgcagtttgtatgtaagaagaaacggaagcccggagagcttccgttttattgattacagtttttcttcaattttcgccttcgttttcgggccgtaaattccgtctgccgttaacccgctgacggattgaaaacgttttacggcatttgccgttttcggaccgtaaacgccgtccgccccatgattttttgctcctttatcaggataaaaataaagagcggataaagcgttttgcacttgttttacgtttgtccctttcgtcagcggtttcgtcactttgatcacacctgatggaagcggataggaagacacagcctgactttttgaagaagaacccgtctgagcgagcttgatcacttgtccgactgtaatgtgattcggatctgtgatatggttgatgctttgcagcgattttacgctgacaccgtgcgatgcggcgatttccgataaggtgtcgccttttttcacatggtattcagacgcggaagaagaaatagaggcttttttcgccggcatacttccgcttaatttcttttcaatcttcgccttcacttcatcccagcggccttcagacaaaatgcggtgcgggcagtactttccgttccagtcctgatgctttctgattctgtcaatcccccagccccgttctttcaaaagctgcgccgcgaacgcaatcgccagttcttctgcggctctgtaccgttcgccgcctgacttgctgtaacagatttctatagcaatcgactttcggtttccggtaccgttcgtgccgtctcccgaatgccaggcattccggtccaacggaattccctggatcacttctttgtcatcaaccgcaaaatgatagcttgttgattcgctgtttcccgtcatatagctgatttcgttagcggcggatgcgtcgtttgccgtgttatgaatggtaatatactccggcgtcatcggattcggacattttaacgcatatttatcagccgatacgagccgttttttcacttcaatccccactcttcatctctccttatgcctttttcatcaataggtggcattcgtaggacagataacttgagcatatagaccctgcattcggataaaaatggaatggatacgcatgcaaaaaataagacccttccaaagaagggtctttatgttatgtttggttgcgcgcggcaatatggaatgtgccgtccgcttgattttccaaatggctttcatggccgatcacctgtgtaaagctgaacccgacagcaacaagcagcaatcctgacaacagtttagatttcatatagacaatctcctctctggatttgtttttgggcgtgcaccattttttcataaaacgtgagcgctttttcaggctgtccgtgtttcatgtaaaatttggcagcgtcatgcgccaattcttccacatacggatacagcatgtgttcttccagaaaatcaaacgtgtgcctgacggatgcgttatccatttccttgccgtataacgcatgtaaaaattggaacagattcacaaacaattcatcattgtattcgcgggcgatactgagcccgaggcggtattgcttctctgcttcggctgtagtgttctgtttataaagaacctgtgttaatgagtaaatagaatgcggaagattatcgaacttttctgacctgcaaatggaaacggatgtctcaaaatattcggctgctttagagaggtctcccattttttcgtaacagtttccgagattatataaggctgaactgataagacggggattgccttcttgttttgcaagatctaaagcaagttctaagtggggcaatgctctttctggatactgcatgtcatcataattccctgcaataacgaattcacattggattctgcggacgttgtacgtctcatacgattggtacgtttcaagggcttgaacggcataactcatggagacgtaggtttgtttcaggttgtaaaatatctcggccattttaaaagcaaactcagctttctcgatgtcatcagaaacgagtgcaaggtttttttcagcccgtttgtaatacatcatggcgtttaggaacattttctgtttaaattcgtacattcctcgaaaaaaattaaagtagtaatcaagcagtcctgtcagtttatactggttgccttcaatgtcttccaataattctgaaaactcaggctgagaagggtcctcttttaagggcttgatgtaatccagcatgacacggtgtctgaattccattaatgaataatacagcagcagatcctgatcttcttccatatcctcgatctctctctctacttcacgtttgacgcgctccgcctcaaggacgtgaaactgccggatatgggtataccattcattaattttgagcccgacaaaagaggacggaatagtctgcttcatcctcaataaatccccccttttggaatgaccgagatatgtcatattttatcatatttgctagaaaaagaagaacgcaaaaagaccgcaattgtcgaatttcggatatccgcaacgatttatctccgtcacaagcttattgcttgtttcttccgtgccgttgatatagcatatccttgcagctttttattctgtattaaatgggggttttcacatgacagcacaaaatcaattggtcagccactttctgtcacatcgaaacgtgacgattgagctggcggaaaaaatcagccgcgaacattacgattacaagccggcagagacatcaatgtccgctcaggaacttgtaaaacacatcgtttattcttttcttatgtttgcaaacgtcattaacgacggaaacggatcagctatccagaacaaaccgaaagaagaagcggaaacagacctcgtcaaactggctgaagcatgtactgaaaaaacgacagacatcctgtcacagctgactgaagagcagctgaaccgcgaaattgacctgactgcctctttcggcagaaaaataaacggcgcggctctccttcagcttgccatggagcatgaaattcatcataaaggcaatcttttcgtgtatgtcagagaaatgggccacacggaacttccgttttatcagcaaaaatcataatccggccatccgccggtctgcgacataacagcaggctggcggattttttgttctgtataaaattttccgaaaatttaattgattaccgcctcttaatcatatataatctgataaaaatagtaggattattcaggaggcacacagatgactgtaagcattgtgtttatgggtttctttgtcggaacgcttgtcggattgacgggtgtgggaggagcagcgcttttgactcctttactgatcgttttggggatcaacccctcaatcgccgtcggcactgaccttttatataactccatcaccaaactgttcggtgtcgtttctcattggaagcagcgcaccgttcaatttaaacttgtcggctacttggcgctcggaagcattcccagcgcaacagccgccatcggtgttcttcacttgtttcccgcttttcaccagcatcaggagcagattatcaaacaggcgctcggctacgtgctgacccttgtagccatttccattatcgcccgcctttttttcgataaaaaactgcggccgaaccgctggcagcaaaaaacgcttgaagaaaagcggacactcatgatattgatcggcgtcattttcggtttcatcgtcggcctgacatctattggatccggctcattatttgcgatcgccatgctatacctgttcagaatgaaaacggcagaagtggtgggaacggatatcgcacatgcctttctgctcgtaactgttgccggtctgttaaacgcaagcttcggaagcgtcgattacctgcttgtattgaatctgttgatcggctctgtgccgggtgtgcttctcggcagcttcttttcgccgaaattctcaccgcgcccgctgcagtttgtgatggcggcgattattttaatcagcggaataaaattaatataaaaaaggcggtctgttgtcagatcgccttttcccttataacgtcacaccggacttaaagattgcaagctcccgaaaatcgtttttttcgttattgacgaattctccgcttgcaactttaataatgtattgaataaaatctcttacaatgtgatcttctgttgtttggtcttccgccaatctgcccgcgttgtaatcaatccaatgaggctttgattgaaataaatcggtatttgttgatactttcacagtcgggacaaatgtgccgaacggcgtgcctcttccggttgtaaacaaaacgatgtgacagcccgccgcggcgagcgctgaagaagctattaaatcattgccgggcgcactgagcagtgtcaatccctttgttttcagtgtttcaccgtatgtcagcacatcagaaaccggtgcaagaccggctttttgggtgcagccgagcgacttgtcttcgagcgttgaaatgccgccttccttattccctggtgacgggttttcataaatcggctgctcgtgcttcataaaatattgcttgaaatcattgatcaatcggactgttttatgaaacacttcttcactcgccgcacgctgcatgagaatcgtctcagcgccgaacatctcaggcacctccgttaagaccgtgctccctccctgtgcaatcaagtaatctgaaaatctccctaataaagggtttgcggtgatgccggaaaaaccgtccgacccgccgcatttcaatccgatgctcaattctgacagcggaatgtcctcacgtttatctccctttgccgcaaggtgtatctctttaagaagcgcagtacccgcttcaatttcatctgtgacagcttgtgattcgagaaatttcacccgatctccgttcacttcagaaagggtttccctaatcgccgccagctcattattttcacagccgagccctaaaaccagcacaccgcccgcatttggatgacggatggcgttcatcagcatttgtttcgtattctcatgatcatcgccaagctgggagcagccgtattggtgctttaaaaccagcacattgtcaaagggcgcaatgtctttcgcctcttttacgaaacgctgcaggattttctcagcgacgccgtttacgcagccgactgtaggcacgatccacagttcattccggacgccggatgtaccgttttctcttctgtagcctttaaatgtccggttctcatttgtaaaaggattgtcctcgaagcgcggtgaatacatgtattcttgcacatcggataaattcgtttgcagattatgggtatgaatatgctcgccggccgaaatccgccttgtcgcacgcccgattgaaaaaccgtatttaatgatgctgccgttttcttcaatggtttgcagcgcgattttatgcccccgctttacagggtccttcacttcaatcgtcagtccgtctgtatgcagccgctcccctttgttaaaatggcgcatggcgagaagcacgttatcgtttttatggatttttatgacctctttcatttcacttcccccttttttccgcagcattcatgtaacgcatgcttcataccccgcttatgaatgacagacagaaaaaaagccgttcgttcattcagccccggaagatgattcagattcttcccccacaatcgctcttctcctaatatggcagatgccgcttgaaacatatcatctttgcaacgggaccgcgccatttgaaaacggttaagaacctcctcgccgtctgccggtttgttcggtccgttccagtatgaatagatcatggcgctgaacgaaaataccagcttctcaggtagccggccctcctgttcgatataagccttcagcgtcggcaggtttcttgttttgaatttcgcggcggcgttaagggtaatgctttgcagataatggtggatataagggtttttaaaccgctgtaacacatctgccgcgtattgggtgacaccctctatttgcagcacagggaggatttcttcattgatcagctcttcaatgaatctgcccgtcacctcgtgctcagccgcttcccggacggtttgcagtccgtatagtaaagccactggcgccaatgccgtgtgagcgccgtttaagattctcaccttttttgtcctgtaagacgtaaggtcagacgtgatcagtgcgttcagcccggcctcagcaaaaggaagctcattctgaagctgttccggcccttctatcacccacaaataataatgctcaccaaccacaagcagacggtcttcgtatccgagaaaatcggtaagttcttccgcggtatcaacaggaaatccgggaacaatccgatccacgagggtattgcagaagatgttcgcgtcatgaatccattgagtaaaaccaggttccagctcccacagcccggcatattgaagcacggccgccttcagtttccgtccgttttcttcgaccagttcacatggaagcacaatgcaccctttctcggcgtcacccgcaaatgccttatagcggaaataaaggaacgccgctaatttcccggggaatgttttttgaggtctatcctcaagccggtcgcctttctcaaacgtgattcccgcttccgtcgtattagaaatgataaaacgaagatcctcttgtgctgccagccgtttaaaggaatcatagtcagaaaaaagatcaatgccgcggctgatggatttgacgatcgtgtgttcttcagccggttttccgtcctttatcccctgcaaaaaaagcgtaaataaaccgtcctgctcgtttaaacgttttattttctcagagcctctcggctgtacggcgacaacgcttccgttaaaatccgtcaattgattcaattgatcgatctgccagtcagcgaaagcccgcaaaaagttgccttcaccgaactgaaggactttttcaggatattgaatgtattcgccgcacatctttttattcagctgctgcaagctgtccgcctccttctgcatttatgcacacgttaacattttaccgtacgaaaaaacggatattcagacgggccgttatgtgagttttttaatggaatctcttatcatcacctcggtgttttcgtatattttttccgccgccgtatccgggtcggcgattagcgccaaaatcttctctgcgccaagtatgctgatgttttcaaccgggcgttttactgtcgaaagcctcggcgtcatgtattgggaaatgccgatgtcatcaaacccgataacggatatatcttccggaacgttcaggcctttggcgaaaatggcgttcatcgccccgatcgccatatcatcgtttgaacaaaaaacagccgtaggaggtgattgaagcgccaagagtttttccatcgcctgactgccgctttccatatcatagcggccttttacactgtattcatgcttaatcgggatagaatgatcaattaaagatgtcaaatagccttctttccgctgagaagttgacctgaatccttcctttccctcaatgatcgcgatatctctgtgtccgtttgcgatcaggcagtcgaccgcctgtctggagccttctttatcgtttgacaggatattcgtgatgctccggtcatcaatgtcccggttcagcacgacaagcgggatgtttttctcgcggatatgataaataaatgaattatcactgtcgctttggctcattaaaatgattccgtcatatctcatgggcgtaatggtttcaaagcttttcaggtcgtcaatcgcgcggacgaacaaattgtattcctcactgattgtgcggtttacacctttgatggtatcggaaaaaaagctgtgtgaggttccgtttgtgatgcttgtaaaaaacagcccgatcgtatgggacttttgcatggcaaggctttttgcatttacattcggtgtgtaattcagctgtgaagcgagctctaatattttctgttttgtatgctctttaatgtaggggctgccgttaagtgcccgggatacggttgtgtgggatacgttggcgagttttgcgatatcttttatggttaccatcgtttttcctttctttctgtatgctggcatttatttctattgtaccattaacggacagtccataaaatcacaaaagttaaggttttgcatgatgtaagtcctgaacgagctcggcatgctgccggtccgtcagtttatacattaaaccgataatcagcatggcgcacgctaaagcgaaagccgggtacagcagcagaagccctttaatcccgatcagcgtgccttttgtctgagatgcattcgggatatagccgataacgctcagcccgatgcctgaaagaaaacctgataaagattgggcgagttttctggagaagttgaaaagcgaatatgtcgtcgcctccttccgttcacccgtcttccattccccgtaatcaataatgtccgacacaagcgcccacgtaatgccgtttggtatgctgatcccgataaaagcaatgctcgctaacgccgtaaagatatatacatttgacggcagacagaaattcagcgcatcagccgcggcgctgacggcaaaaccgatcatcaccgtttgcttttttccgaaacgtttgacgagtttcggcataaacaaaacacctaaaaatgaagaaccgatgataataaaactcatgtaggacatcagctccgcattgttgagattgtactgggcgaagtaaacaagcatagcggatttaatgttatatgccgatattgagaaaatcgtcatgaaaacgacggtcagaagcggtttgttgccgataaagcatttgaaaaccgacatgacggacagcttttctttcggcgcttcacggacgataattctttctttgcagtttcggtagcagatcataaatcccgcgattccgattacggccatcattcccatgactgccgggtagccgatgtgaacgttatcaaaatgaacaagaatcgggatgacgatgacacttgtaatgagcagcgcgccgagggagcctatctggcggaatgcggaaagcgccgttctgtcctccgcatcctgtgtaatggccgcgccgagagagccgtacggaatattgacgaaagaataagcgaccccccacagcatgtaagaagcataggcgtacacaagcttccaggtgacgctcacgtccggtgacacaaaaatcaatacggtcatgaccgcaagaataatacttccgaataataagtacggcctgaatttcccccggggtccgatcttttttctgtagtcaatggccgagccgacaatcggatcagtcaaagccgcaaacagcttgctgaccaaaaaaatactgccggcgaacgctgccggaatgcctgcgacatctgtgaaaaacttcagcaaatagatctgcccgagatcaaacataaatccgttcccaaaatctccaaaaccataggatactttttctttcagactcagcttatgctccttcacttttgcggcaggtgctgtcacgacaggcacattactcataggccacctctttcattccattttttaaaagcggaaatattcctcagcattccggtaacaaatcccctcgacaatctttcctaaaagctccatatcgtaaggcgcttcgccttgttccgcccagccgccgatcagcgtgcagacaagccgcctgaagtattcatggcggggataggacaggaaacttcttgaatccgtcagcatcccgataaaacggctgaacaggcctgtgtttgataacgctttcatttgctggagcattccatctttcgtgtcattgaaccaccaggctgtgccgaattgaattttccccggtgttttcccatcctgaaagctgttgatcatgctggcgataatatagttgtcattcggattcaaagaatacaaaatcgttttaggcaattgccgctttttttcggcggaatctaacagccgggcaagcggttttgcgatacgttcatcattaattgagtcatatcccgtatcaggaccgaggctgctgaacttatttgtattggtatttcttaacgcgttaatatggaactgcatcgcccagtccagttcggcgtaaagaccgcaaagatattgcagtgtccgtgttctgaatttcttttcatcttcaaaagacacatgctctccgcttaatccggctgcaaaaatccgggccgcttcctcttcggtcgtctcggcataaaccatttgatctaacgcatgatccgacactcttcccccggcattgtgaaaaaagcggacgcgggattctaacgcatctaaatacgattggtaggtggtgacagccattccggaagcgctctccagcgaacggacccaatcggcaaaacccgggctgctgatgtccagtcctttgtcaggccgaaatccgggcagcacttgaaccggaaaatcactttctttcaacagttcgtggtatgtcagcgcatcggcaggatcgtcggttgtgcaaatgactttgacatttgatttcagaatgagatcccttgcgccaaacccgtctccctgcaggagctcattcgtttttttccaaattgccgcggccgttttttcattcaatacgtcataaatgccgaaccagcgctgcagctctaaatgcgtccagctgtacagcggattgcctatcgccatcggcaccgtttttgcccaggcgaaaaacttctcttcatctgaagcgtttccggtaatgcagcgctcttcaatgccgttggccctcatgatccgccacttgtagtggtcaccgtaaagccatgcctccgtaatcgttgcgaaggttttattttcatagatttcctttgggcttaagtgacagtgataatcaatgatcggcatgttttcggcgtattccctgtacagctttacggccgttttactatccagtaaaaaatcatcacccataaaagctttcacattttcatcctccctcttaaaaatgttaacgttaacaaaatgattcttttttattttagcttcctctttctcacatatcaatcatttttattttatttttcagaaaattgtatccgttaacattttcatacaaaaaaaaagacactgccgagaaagtccggcaatgtcttctgtgtgatcttaaggattagtaagcgaggctgaataatcctttgatatgtgttaaataacgtacgttacttgcttctttcattaaagatgccggaagacctttcagcggagtagagttcgctccgatgatggcaaccgcgtctttacgtccgaggcttgcaagcgtaccagagtttacaggcttgaatgtttcaagcgtttttccttctaagtaagcgaacaggttgtaacccacaagttcacccatctgccaagcgatttgcgctgtcggcgggtacggacggccgtccggcgcaaagtatacagcgctgtctccgacaacgaatacatcttcgtgagaagtagattgtaagaaatcgttaaccgtcgcacgtccgcggttcacttcaaggccggattcgccgactaacgggttgccttgtacgccgcctgtccatacaaatgtgttggcaacgacttttgaaccgtctttcagatcaataacgtttccttcaacatttgtaacaggaagacctgttaagaactcaacgccgcgtttttcaagactttttgtcgcgcgttcgataaggtcatcaggaagaacaggaagaattttcggacctgcttctactaatttcagtttgattgctttcggatctacgccgtattttttcgtaaggttcggcatgatgtcagcaagctcaccgacaagctcgacgcctgttaagccgccgccgccgataaggatcgttgcatcagcttcgtttttcgttttagcgtattcacgcacacggtcttccacgtgtttgtatactttgttggcatcagcagcagatttcagcaccatgctgttttcttcgagtccaggaatgccgaaataagccgtaacagaaccaagtccgacaacaagcgcatcataagtcagcttagaaccgtcagaaagggcaacttctttcttatcaactgagaaagaattgacttctgcgattttaatgtcgacgtcttttcctttcagaagtttttcaagcggcatagcaacagcctgttcagacacgttgcccgctgcaaggcggtgcagttccgtaatgatttggtgagtcgggtatttgttcacaacggttacgcgtgcttcatctttactgtaatgtttgcgaacggttaaagcagaaagaactccgccgtaaccagcgcctaaaatgacaatatgttttgacatcgtatatcctccgtcctttatatcaatttgaatctgagattatttttgtttttcgttcatgatttcaagatagctgttagcaaaacggaacagcttttgagcttgaggatctttcagcatgcgcagcaggccgaaaagtccgatcgtttcattgcttgcatccgcgcggtcttttgcttcgatcgcagtagccgccacttctttcgctgtttctttcaccggctcaagaatttctgtaagcgcacccactgtatcgctcttcaatacttcgtctgtcgctacagactgtgcaaaatcataagacttcgttaaaatatttactaactcagtcagttttggaagctgatccactaaaacagtcagtgattcttgaacttcaggttttagcagctgatcaataagatcgcgttggccttggctgacagatgcatttgtttgatcgattgtttctggcatatccgattctcctttactataagcagtatgctgatttttttggaaagggtagcctttcccccttcatgcagaaaagcatgaaaaagcaagattgtgaattcatgcacaatcatttacaaaaataaatgtttactacccagtttttcactttgccatatccagtattatttttatatcaacaaaaacaattgaataagtcaaaatttctttttcctctctgaaaatagcaaacataaaaaaccccaatttgatttactcttatataataacactttttgaacaaaatttgaacgtgaattgtttcgtttatgaaattatttatatggcgggggtgtaataacgtttcttttaggctatttttttacagaccatccgctttccccctgtcatttttcccacaattttaatagcgggcccgtttttcccgtaaaggggtcgcattccgggagcgggacacggctgattacttctggagttctatcatttttctccgtttttgtatcgtactgccggccgcccggataagccccgatcacggtaaaatcagaactgcccgacagttttttatgtccggtgccggccggaatgaccgctgagtctcccatttgaagaacggcgtccgctccttgttccccgccgaacctcaaaaccgcgtttccttttaccgcgacaagaacttcgtgcgtggtgctatgaaaatggtgatacggaaatactccgcccgtccagctgttcgaccaatcgtgccggctgaggacggactctgctttctgcaccgtttcttcattaaataccgctttataaataacaagcggaagattcgggttattcggaatgcggccgtcatcttcaaaataaagcacttgaatatcctctttctgcattgttttcacctccgtatatgtctgtttcccattcatcatttgttaaaacgctattttctcatattccattgcgaagcctgccggtgaatagtatagtataaaaaaatatgtgtcaaatgagggatttaatgaaagccatcgtgatcggaatattggcatctctgttttttgcagtcacatttattttaaacagggcgatggagctttccggcggaagctggatgtggagctcttccctgcgttttctttttatggttccgtttttatttttgatcgtttatgcgaaaggaaaatgggcgccgctctggcatgaaatccggaaaaaaccgtttttttggctgaagtggagttttaccgggttcgtgcttttttatgccccgattacgtttgcggcggcatatgggccgggctggctgatcgccggcacgtggcagattacaattgtcgcgggtgtgcttctgtcgccgtttttctacgaaacaaaaaattcaccggcgggcccggtttccgtcagacaaaagatcccgctgatttcgctggttacttccgtcatcatcctgatcggagccggtctgattcagcttcagcatgcgggttctctgtccggccgcacggtactattcagcgtggtgccggtcgtcattgccgcttttgcctatccgctcggcaaccgcaaaatgctggaacaatacggcggaaaactcgatacgtttcagcgggtgctcggcatgacgctcgcaagccttccgttttggcttttgatcgccgctttcggctggcatagagacgggcttccgtcaatgggacagtcattccaatcctttatcgtcgcactcagctctggcgttatcgcaacagtattatttttccgcgccaccgatatggtgaggaatgagccgcagaagctcgctgctgttgaagcgacgcagtccggagaggttctttttgcactgatcggcgaaatcgtctttttatccgcggcgtttccgtcacttctttcatttgccggactgttcattattattgcgggaatggtcatgcatacattcgcttcccggcagacagaccagaaaacggctgagcaaacggcagccaatctcaccggttcctgatttttttacgaaaggtgtcctcctgtatgaaagaagaaattccggcaatatcttttctgtcagccggcaaacgctttgaacaaaacaatacgtcctttgatgtcctcagccgtgtaaccggacatattcaaaaaggttctatcacggcgttgataggcccttccggcgcaggaaaaagcacattgctgtcactgtgcaatctgatgaatacacctgatgaaggggaagtgcttgtattcggaaaagaaataagacactgggacatcagagagctcagaaaaaccgcgggccttgcatttcaatcagctcccgtcctcgagggaacggtgcgggacaaccttctgctcgcagaaaaactccacgggacacagcactatacgcctgaagagctcgcagattttacagaccttccgcgcgggcttctggatcgaaatgcaaaagaattatccggagggcagcggcagaagctctcattagcgcgaactctcgccggactgccgtccatcctgctgctggatgaaatcacctcggcgctggacccgtcatccgttctcaccattgagaaactgattacgaaactccatcggcaaaaacagcagacggtcctgtggatcacccataaccttgaacaagcggaacgattatccgatacggtatggtttatggctgagggtcggcttttagagaccgcggaaacgaaaacgttctttaaggaaccgaaacacgaaaaggcccgggcgcttttacaagggagcgggtgctgatatgaatgatctttctctattattgacaagtatatttgtcattattgctttattcctgtctaaatcttttaaagccggcgtcgaaaaggatatgatcgtcgcaaccgtcagggccgtcattcagcttctcatcatcggctatgtgctgtcgctgatttttcgcggtgatcacccgatatttatcatattaatggtgcttctcatgctcacggccgcttcgcacaatgtctccaaacggaataaaatgcggatcggctcattttggcgcgtttttctgacactggcgatcgcggaaaccgtgacgcagggacttttactgacccttcacatcattccgttcacttcaagatatgtcattccgataagcggcatggtcatcggaaactccatggtgctctcaagcctgtttttaagcaggctcagttcggaagcagacctgcggaaagaagaaatccagctgattctctctctcggaggaacgcctaagcaggccgtccggcagatattgacgtccagtatgaagctcagtatgatcccgacgcttgaaagccagaaaacattgggtctcgttcagcttcccggcatgatgacggggcagattttagcgggggctgatccgatacaggcggtgcgctttcagctgctgatcgtttttacaacgatggcctccgctcttcttacatgtatcatactcagcgccttgacatatccttcccttttcacggaacactggcaattaaaaaaattcagcagggaagcgtaggcttttttccctgctgaatgatggtttatgacaaggtcagagattcatagtaacgggataattcaataatcatcgctcccatccgctcaatgtccggagcaaggaccctctttaccccttcatcccggatcgcttcagccgtcactttgccgactgcggcggcaagcacttgtttttcgaatgcctgctgcaattcttttgtgatccctttttcttttgcataatcaaagagagaacgcacttgaatggctgtcgtaaaacatacggcatcgacctctccgtttaacagctctcccagcagtttatcgaccgtctccctttcaggcggaatatgctgatacggcagaacagggaatacctccgctccgtttttctcaaggaactccgttaagaccggcgctttttcgccatgaagctgtatcatgacttttttatctttaaagtcaaatcgttccaaggagcggatcagccctcttgttgtaccgtcttcatctgaggcatgcggcgtgatgccgagtttttttaaggccgcatatgttttatagcctctgcagccgattttcgcttcatgaacggccgctaaaaattcttctttcagaccgattttttccgataccgacaataacgtttccgtaccgatgcctgtggtgaatatcacccagtcggctttttgcccggcaaatgttcttacgtcgggttccatttgatcctccgccaggtatacggttccttggagggaacggacgaccgccgttccgccctgcttttctattaatcttgtgatctcttctgttttccgcgaaccgccgatggcaatccgtttcccgttcaatccttttcccatcgctgttttcttcttcccttcagatgccgggcgccctatggcaggccgtcatttatttctattattgttacgcaatcagccgggaaaatcaagctatgctcccgttgaatcccccgtgcagttgctgtatcattaaccgggcagaacgatttgattcgcggagggattttcaatcatggaaacaaaaaaagagttcgagacaaaaggatacgatacttcggtcatttatgagttcaatgaatatcctgatgttcacagcggccgatgtgacaattgcgactacacgctgtttaaaagctcagtgaagggcggaaaatttttgagggaatgccggagatgcggcatgaagaaaaacatataacaaaacaggcagccgtcttccggtgcgctgcctgtttctcaatcaattttcgacggccgcctttttcaaaaattcttcaatggcacaaacagcctgtttggggccgccggtttcttctattttctgctgcatgcttttcacgcggctgaggatgtttttatcgctgtatacgttctgaacgtctttttgcaaacgggccacagtgacttctttcggcggcagatgcacgccaagccccaattcatccacacgctttgcggtgacctcttgttcgtgcatttgcggaacgacaacgagcgggacacccgcattcatcgcttccattgtactgttcatcccgccgtgagatacgaacagctttgctttctccagcacatcaagctgaggaacgtgctggcggatgataaagtgatcggggacatccgaaaaactttccggatcaattgttgtgccgactgacataataacccgccagtccgagtcccgaaacgcgtcaatacacatctggtaaaattcaggccaggcgttaaacgccgttcccagtgagatgagcataagcggacggtcatcggctgcatcaatttccagacttcccgtatttgtgcgttctccaagagacggacccacaaaacagaatcgttcatcaaaggtttcctgtttcggctgaaaggcccttggcataaagacaatattcagtttttcaggcataaaaaattcttccattgtcatccgtttcaattgttcattttcaatctgctcctggtattcttctatcgcctgtttggccgcttccagtgtttcttcgtctcttcctaattgaaaatactcattcattgcatagctcgggcagaactttacggccgggatgccgctattatccgcaaacaattttccggcaagagctaaaaaatcaaacaggacgatgtcaggaaggtcgtctttgtacagctcttccagctgcggaagcacttcaaccgcttcttccagaaacatcacaaacgcatcatttttatttacccgttcttttatcgtctccgggtccgcctttatgcttgtgcggtataaaacgggaatggcgcccgttttggcaacggaagcttcgaattcctcagtcgtagcgaatgtcactttatacccgcgattgacaagttcctcggctacaggcagcgtgggattgacatgaccgtgagcggccacattaataatggcgatgtgtgtttttctcatcatttttcttctccctcattttcgtttatctccgcttctaaagactccagcccgtacatgacactgtttcggatcggctcaatctggaccggctcaaggtgtgaaaaggcttttacaattcctttcagcgccacttccgcttcaagtctggcaagcggggcgcctaagcagaagtgtacgccgaatccgaaggaaaggtgcggattcgattggcgatgaatatcaaatacgcccgccttctcaaatttgttttcatcacggttggcagatgcaacgtagcagagaacgatctccccgcttttcaagcggcgtccgcgcagttcagtgtcgtgccggaccgtccttctgacaaacggagcgggagcgcgaaaacgcagcgtctcttccaccgtttgcgcgatgagagaagggtcctgtctcagctcttcataaaggccgggcgtctctaatatgctgtaaaacgcatttgaaatgagattagtcgttgtttcatttcccgccactaaaagcaggttgcaaaacgggatcagatcttctgccgtgagcttctctccctcttcttcctcttttatcaaaatagaaataatgtcttggccgggctgttttcgtttactttctattatttccgcaaaaaacgccgccagctccgcctcacattggtcacgttcctgctgatttttctccgccgcttcaggactcgcatctttcggcatgctgacgagaatgtccgaccattttttaaactgatccatacgttcggacggaacgcctaataattctgaaatcaccatgaccggcaaagggtaagagagatctttaacgatatcaatccgccctttgttctttgcctgtttcaggagatgatcggtaatgtctttaattctcggctcccattccttcaagacgcggggagtgaaagcgcgattgacggcggatctgatttgggtatgcttcggcgggtccatattcagcatggactttgcaatcgagcttttcacatcagtcatgaggcttgagaacgtctctttatcactgatgacttttttgacatcatcgtataaaaacacactccaaaccttcgtttcttcatcaaagtgtatagggctttcccgtctcattttttcataccaaggaaaagggttgtatacgtccaggccgttttttcctttcatcagggttctttggatggcttgtctcgtgctcctcagcttactcatgtttcatcactcctgattgtttcatatttgaatagttgacgtaccttgaattttatcctagcacatattttcaatttttttctattcataaccttaactattaacataacacaacaaaagtcatgaatccggaggtgaaatttctcccaagaaaacagcataagcacgcaaaaaacccgagccttcggccaggctcgggagatatgttcactcattcgtctgcggtttctggtgctgcttttggtcttcaggaggctgcgtatttctttccatatcgtccgtatcagcgcccatgcctttcaggaaagaaaacagcagagtgacggccttgttgatttccgggtcttttaaagcgcggacgatatcaaaatacccggtcttcctgccgctgtctttttcctcgacggcctttgtgacccccgcattgattttaacgataaacggctcaagctgttttacatcgagcatgccgagaacgccgcttaacagcaggagatttttcagcatattggccgtttccggattattcgccttcttcacgaggatatccatcactttgtctccctggccgaagagcccgcgcagaagcgccaaaacgccgcgctcgttcatgtgctgaagaatgtgcagagattccaaaatcgcgtctttatttcgtaaaagagccgtctcgatctcttctaagtccttttttcgtttgtcttcttctgtgacggtctgttttcggatgccgctgattgctttagccattttgctgcttccccctttttacggcgtctcccggaaatacataatctttacgcgcccatttccgatcaacccggacaccgatctgcggctgcgggtttccgtaacggaaattgattttcggaagcggattaacgccttcttttttcaaaatctccatcttcgctgatgtttctttataagccggtgtatcggtatccttatccgcatagctgcttgtcaaaaggttaatggcggcgtcttttgaatcgttcatcggaagatagacttgtttaccttttaccctgtctgtgatgacgcatttgactttcacatttccgtacggtgaagtcagacggacaagcgttccgtcttccagccctctttcttcggcgagttcgggcgagacctcaaggaacacactcggtgttttttcggatattccttttgatcggtaagtcagattcccttcgtgaaaatgctcgagcagcctcccgttattcacatggatatcatattcttcatcaaattctttcggctcggtccactgaacgggatatagaatcgctttgccgtctgaaaacgggaacttgtccgtaaataaaagcggtgaatcggttccgtccgctgcaaccggccattgcagtgaattgtagccttcgagacgttcgtaagtgacgcctgcatagagcggcgaaagcattgccgcttcttccataatgtctgccggatgttcatagtgccaatcagcgcccagacggttggcgatatccgtaatgatctgccaatcaggctttgaatcgcccagcggttcaaacacttcgtaaaggcgctgcaccctccgttccgtattcgtaaacgtcccttctttttcaaggctcgggcttgccggaagcacgacatcggcgaactcggccgtacgcgaaagaaagatatcctgcacaacgaagaaatcaagcttttcaaatgcggcatgaacatggttaatattggagtcgacaagccccatttcttctccttttaagtacatggacttcagttttcctgagtggatgccttcgatcatttcatgatttgtcattccgatttctttcggcaagtctgttccccagccctgctcatactttttgcgggctttttcatccgttactttttcatagccggggaagctgtcaggcatactgccgaaatcactggctccctgcacgttattatggccccgaagcggatatgagcctgcgccgggcttgccgtaatttccggtcacaagaagcatgttggaaatggccgtgctcgtatcacttcctccgatatgctgggtgacacccatcgcccacagtgcgcacacgctgccggcttcatgaatcatccgggccactttgattagggtatccttgtccacaccggtatgtttttccgcatattccattgtataaggttcaaggcttttcacgaattcatctaatccgttcactctctccttcagaaatgcagtatccgccaaatcgtgatccagcagatatttcgatacggcattcagccagacaatatctgatccggcacgcggctggaaaaacacatcggagcgctcggccatttcatgttttcgcaagtcagcgacgacgagcttctgtccgtgcagtttatgagaacgtttaatgcgtgtggacaggacggggtgagactcagacgtatttgagccgataatcagcacgagctcagctttttctatatctgtaatcgaccctgaatcaccgccgtatccgaccgttctgaacaatccggccgtggcgggagactggcagtagcgtgagcagttgtcgacattatttgtgccgatgacggctcttgcaagcttctgcatcacgtatgattcttcattcgtgcatttggaagatgtgataaaggcaagtgcgtccgggccgaaatgttcttttatatcggtaaatttatcagcgatcagctgcagcgcttcatcccattccgcctcccgaaacgagtctccttcccggataagcggtttggtaaggcgcttttcactattgacgaaatcccagccgaatttccctttcacacacgtcgaaatgccatttgcgggcgcctcggcctgaggttctacctttaaaatgtctcttcctttcgtccatatatcaaaactgcagccgacaccgcagtaagtgcatacggttttcgttttcttgattctttcatcccgcatggccgattccatgtccgatatggccaaaatcgatccgtatccggtttcgacgccttttgtgatgtcaatcatcggacgaagcgtctcttggttaatgcctgttaaataccccgcttcgccttccatgcctttttccatcatggcattacacggacataccgtcgaacaatgtccgcaggaaacacatgatgattcattgatcggcacatcctgatcccaaatgacccgcgggcgtttccgctcccaatcaatgcttaaggtttcggttacctgtacgtcctgacaggcttcgacgcagcgtccgcacaaaatgcactggtcgggatcatatcggtaaaacggatttgattcatctttaggatacggtttttgatcgaacggaatgctttgatgattgattttcatttcctttacggtattatgtacttcgcagctcccattgttgtaatcacagaccgtgcagtacaattcatggttgtgcaaaatgttgtccatgccgataatctgcgcttttttcacatcggacgaaagcgtatcgatgacatctccgtcctttatttgcgcggaacacgaacgcaccagttccccgttaacattgacgatacaggtatcgcacgtttcaatcggcccgagactcggatgataacacacgtgcggcacgtcaattgaactattgttcaaaagctgcaaaacggtttgaccgtcccgagcttccatttcaaccccattgattgtaaccttctttgtatcagccattttcttttcccctttctgtacccctctatacatcctctatgattcccagccggcctttcactaaaacatctcgtttatctcaggaaacatgcgggtatgagcggtaaaaaggaggcgttcacatatgttgaagaaaaaaacactcgtcaccggattatcggcggtgatgctcacgggatgcgcattcggagcagaagcattttcggatacacagcccgtccatgccgcagccgcttcaaaaacagaaaaccaacgtgcacaagaactggtgaacagcctttatcaatcggcgtttaaaggggaaatgccgcaaaatgtgaaaggcctgaaagtcaaccaaagcacaagacaggacgtttacgataaaatcggcgagccggaacaaaaagcagacagccgcaatctatttgatttatacagctggaacatgggaaaccccggttatggattttcctatcataaaaacggaaaaatctcggaaatacgctatttcggaacaggggtcgagcggcgcttaaacctcgggagcgtcacacctgacgtcttaagcaaacaaatcggcagcgctgacaaaatcctggcagtgccaaaaacgggcgaaacagattacgtctaccatacggggcagtatgagctccgcttcgtcatcggcagtgaccaaaaagcagaccacgtcaacctaaaagccagataacgcaaaaaaagcggcctcccgggccgttttttcatagacagcttctccgtcgttccttacaatacatgggagtacaaaaaaggggaacagtgtgaagtgaatagacatccattgacatacggaatatgtaccgtttttatcatcgccctcggtttgctgtccagaaccgcatacatcaccgccctattgcccggcatcataaacgcttatttaggagatgccttgtgggcggcaatgatttttacaggattcgggcttctgtttcggaacatccggacggaaacagccgcatttttgagcctctcgttttgctgtctgattgaatgcagccagctgtatcacgcgccttggattgacgcaatcagaagcagcacgctcggcgggctgatcctcggctggcaatttgtctggagtgacattttcgcctataccctcggggtatgcgccgccgcatttttagaatgggccgtaaaaagaaaccgccagtccccttcataatcggagcatgccgccgatatgaagggataaggaggtggaagctatggatatccctgcgttatcaatcgctatgcaccaagcatctctggcgcagaatgtaaatatcgctttaacaaaaacggtcatgcagcatgcacaggctgcggcggaagaaacagtgaaaatgctgccgtcccagcacccgactgccggacattcaattgatgtgaaagtgtaaaaaaagatgccggatgataaccggcgtcttttttttgcccgttgtacgtacaccatacccggcatacaggaataaggtaaacggaaccaacatttgaaaaggaggttttcctcttgtacgatcctttctatcatgaatacacagccgagagccacgaacgggtgccatatcattatccgcggccgccttattatttcccaagaccatatccatactatccgcggccgccttattatttcccaagaccgtatccatactatccgcggccgtatatcccgttctatccctggtattaatgtttgaaaagaaatgactgcagacaggaggcttcccctgtctgctattcaactttgaccgacagaatatacgggagagcttgaactttttccattaccgccgctttcccgcttttgcttttcacccttcccttcacttcaagcaccgccttattcaattcataggacgtaataagaattcctttttcctcaagagaagttaaaatatcatgcatgacggctttctcctcaatcctgaaactgacagacaaagaatgcgccgccggtttaaacagaaaatttaacagttcaagcccgattaacgccaaaatcgtgccgctgatgccgatgacatacatacctgccccgatcgtcagcccgatgcccgacgtagcccaaatccccgcggccgtcgtaagcccccgcacgacatgccgctgcaaaataatcgtgccggctcctaaaaatccgacgccgctgacgacctgcgccgccacccggctcggatcaaaggacgtatggctgttggataacaaatcaaaaaagccgtatttggaaacgatcatcatcaaggcgctgccgacggccactaaaaaatgcgtcctcaaaccggcttccttcgccctgaattctctctccaatccaataagagccccaagcagacccgcaaccgccagacgaatcacaaaatcaagttccatccgtctctctcctttccttatcttcttacccgctttttatcccccgtatctttttctatcagcacaagactgccctgctgaaaaaaactgcatttgaatatatactttggttctttatcatattgtcagtgcccttatttatatgcggaaggtattaagctggcgtttccaaaataaaggaaataacttattgagagtatatgaaacaagtttattcgttgaagctgcggccgcttgtctcttccaatcttctaaaaacagaacgaatgccgctccctcatactcaaaaattgctttcaatccgcaaaaatatatcgtaatataagatataatcttaataaacgatagaaggtggatgataatgtcaaacgaaatcatgcgattaaatgacctctggacagatatttattaccggctccgttatcagcaccatgaaaaaatcactcaccaaggtgtacggattctgcaagtcattcaaaaagagaaggcagtcggaataaaagacattgccgaagcgattcaagtatcacataataccgcttcggaacatataaagcggttactgcagaaaaagtacgtttataaaaccagaagtgttgaggatgagcggaaagtcattttaaaacttaccagtttgggggcggatgtcctttaccggcattccggtcttgatgaagaaaagcttaaacagcttctttttgacagcatgaataatgaagaaagaacacttgtcctaaaagcattcagtttgatgaaggagcgtgctgaagatgtttacgatcgttaaaatcattgtctccgctgctattattgggattatcactgaaatatcaagaagaagccccagttatggaggtataatagcggctttaccaattgtcagtatgctgagcatggtttggctgtacatccaaggcgaaacgaaggagacattaagtcattttgcattcagcgtggcttccggcatcccctccacagtcattatgctggtcattatcggcatcgcccttcgccattcactgtctttcattgccgcatcagggcttggacttacaggatggctggttttcttgtatgctcaggattttatcgtaaaacatataaacagtcagcaataagcaccttagcgcttgtttgtaaatacgaggaattaaaaaaacagggatacccctgtcttaaaagtgactccgattaaaaagcgaaacccctttcttcacgagaagcagacaccgccgaacacaaaaacatcccgtgttgcgaacggagtccgcagcctgtacagccatatcggcatgaagaaccggctgatctctcaaacagaatgtccggcaatcacctcaaaaaacgaggtgaaatctgtcagtatcccgtcatccgccagctgtttttcttcaaatagcgcgcggttttttccgagcgggtcaatggccataatcttgcctgcacctgcttttttcgccgctgtgagccccgaaaaggcatcttcaatgactaagcattcttcaggcctgaggcctaacttttccgatgcgatgagaaaaatatccggcgccggttttccggggaagctcccgtcatcaaacgtgactttgtcaaaatcaaaccaccgatccaactgaaagacgtcaaagtaaaactcgacattttcctttaccgtagccgtggcaatggtcatcggcgtttctgattttttcagatggttcaatacgccggtcagtcccttcgtcagctttaactcatctttgttttcaaggcataattctctgtagtaggcttctttttcaaaagacagcttcttgatttcttcatttgttaaatcgccggaaataaaatacgtcaggatttcactgtttgttctcccgtgaatgttaacgaaaatgtcttcatcagaaatggttttcggcgcgtattttttcaccatgaaaaaccatgctttttcgtgcagatgcgaatcttgaaacatcgtgccgttgaaatcaaaaataacccctttcatcgaaccgcccgccttttttatttttttgcgattttgacatctacatattgctcgtaatgaatttgaacatctttcatcactttatcatccgtaattagataatccatatcgtgcaagttatagaacacgtaaaaatcttcccggttgaattttttattatccgccagcaaaaatttcgtccgcgaattattcagcgcgatttgatgggcttccccttcttcaatgctgtaagaagaaatctcatcattatgtatgccgttggcgctgatgaaggctttcgtaaaattgaatttctgcagattgccgttcacgatgggcccgacgaaggcaccggtattttttcggaaatcgccgccaatcagaatggtatccgcagtgtcaccatgctttaaaatatcaaatacgggatagttgtttgtgataatcctgattcgcttatgcagcaggtgtttggctaaaagttcaatcgtcgtgccgggccctaaaaaaacggtatcgccgtcatttacatatgaagctgcgagttccgcgatcttccccttctcatccatttgaacacccagtttttcattatgcgataattcgtgatcaatggaataagatatgctctgtgcgcctccgtgaatacgtacgatttttccggccttatccagctcgtccagatctcttctcactgtcatatcagaaacatccagttcatcgataatatcactcaccgtaataaatccccgcgagtttacgatatcgatgattttcaaaagacgctctttttttaacatgttcaatcatcccctcaactttacacacaatctaacacactgcggcaacccggtcaacaaaaacaaacactaacaaacaacataatcaacatataaaacagcgaaaaacttataaaacccctatgaaaacagattttatttctttatgaagctattgacaacaaaaatgtatgcgtttactattaaacaaaagataacaattacaaacattaacaaacttcaattcacacattggcgaaggaggattcagtaatgctcaaattacctcatgactttattttcggcggggcgactgcggcatatcaggcggaaggcgccacaaaagaaggcggcaaagggcctgtggcctgggatgaatttcttgaaaaacagggaagattcagccctgatccggcaagtgatttttaccgccagtttccggaagatattaaactatgtgaaaaattcggaataaacggcatccgcctttctatagcctggacgagaattttccctgacggcacgggcaaaatcaatcaggaaggtgttgattactatcatcgtattttctcagagtgccataaacgcaacgtcaccccttttgtcacgctgcatcatttcgatacaccgaaaggattatttgaccagggagatttcctcaaccgcgctgcaatagaagcgttcgtcagctatgcggagttttgctttaaagaattcagcgaaatccgatattggagcacgtttaacgaaatttatcccacagccaccaaccagtatttactcggggttttcccgccatctgttaaaagtgatatcacaaaagtcattcaatgcctccatcacatgatggtagcgcatgcgatgaccgtcaatctttttaaagacggcggctatccgggagaaatcggtgtcgtccactcattggaaacaaaatatcccgccagcgacacagcagaagaccgccatgcctgttttctggatgacgcgttatcagtgagatttctcctcgacgccacctacctcggttattattctgaggaaaccatgcgggctctggatgaaatctgtgaggcaaacggcgcttcatacgagttttcagacaatgactttgacgtgatgaaaaaagcttcaacgcgcaatgattatctcggcatcaatcattatcaatgccatttcgtcaaagcgtacgacggagaaaccgttattcaccataatggaacgggcgataagggcacttcggtctataaagtaaaaggaatcggcgaaagaatttacaaagaaggcctgaagcggactgattgggactggcttatttatcctgaaggcatgtatgacatgctgatgcgcatcaaacgggactatccgcaatataacaaaatgtacattaccgaaaacggcatgggctataaagatgagtttgaagacggcatcattatggataaggcaagaatcgactatttaaaagtctatttagaagccgtcagtaaagcgattaccgacggagtcaatgtaaaggggtacttcttatggtccttaatggatttattttcatggaccaacggctacaacaaacgttacggtcttttttacgtcgactttgacacccaaaaacggtatccgaaagaatcggcctactggtacaaacttgtaagtgaaacaaaaacaatcatttaacgatcatacatggtgaaaagagtctcttttcatcatgtgtgccgtctttaggaggttttttcatgacaaaggaagaattgcagatgctcggttttgaaatcgtcgcctatgccggcgacgccagaagcactttattgaaagtcctgaaagaagtccgtgccggaaacttcgaaaacacggaagcagcattgaaaagcgccgatgaaaatttaaccctcgcccacaatgcgcaaacgaaaatgttagctgaagaagctgaaggcaaggacatggaattaggatttattttcgttcacggtcaggaccacttgatgacaacccttttgctccgtgatcttattcaggattttatagaactctaccgaagctgccgataaggagtggaaaaatgaacggtatcatcaagcaaatcgaaaagggaaaaccgttttttgaaaaaatctcaagaaacatttatttaggcgcgatccgcgacggcttcttaactgccatgcctgttattttattcgcgagcattttcatcctcaccgccgctgtgccggaagtgttgggtttcacttggcctaaaagtgtttctgaatggctttggaaagtttataactattcaatgggcgccctcggtctgatcgttgcggcaacaagtgcgaaatgcctgagtgaatcaatgaaccgaaaaatgccgaaaaacaaagggatcaaccccgtttcagcgatgcttgcttcagtcgtcgggtttctcattttaagcgtcactcaaattgatggcggattctccacggaatacctcggcacaaaaggtcttttagctgcttttgtatccgctttcataacagtgaacgtttacagattctgcgtgctgaaaaatattacgattaaaatgcctaaagaagtaccgggtaccatttcacaaacatttaaagatgtttttccgttcgctttttccgttttggccatggtgatcgttgatttattgatcaggaacacgctgaacgtatcgtttgcggaggctctctcctctctcttatcgccgttttttaccgccgcagacggttatctggggatttgtgtcatttggggaatgatggcgctgttctggtttgtcggcgttcacgggccttctattgtggaaccggccatcgcagctattatttacgcaaatgtggaggcgaacctgcagcttcataatgcaggtgagcaggcgtccaacgtgctgaccgtcggactcgggaacttcgtcggcacaatgggaggaaccggcgcaacccttgtggttccgtttatctttcttcttttcgcgaaatccaagcaattgaaagctgtcggaaaagcatccgcggttccggtgtctttcgcagtaaacgaacctctgctctttgctgcgccgatcattttaaatccttattttttcattccgtttgttgtaacgccgatggtgaatgtctgtctgtttaaatttttcgtggatgttatcggaatgaacagttttatgtatgttcttccgtgggccaccccggcgcccgccggcttgattctcggaaccggcatggggctctcggcttttgtgctgacggctgtattaatcattgtcgatttcctgatatacctgccattctgtaaagcttatgacaaagtattagcggcgaaagaagcccaacacaccgagcctgaaaccgcgccgcaaacattacagcccgccatggccggcgcctccgaagacgcgtcctccgtcatcagcacaaatcttcaggaatcctcatccgccttggaacacagcaccaatgtgttagtgctgtgcgccggagcgggaacgagcgccatgcttgcgaacgcactgacagaaggagccgaagaatataacgtgccgattaccgcctcagcaggcgcctacggatcccattacgacatcatgaaagacttcgatatgatcattttggctccgcaggtcggctcttattacgatgacattaaagaagatgcggaccgcctgcaagtgaaactcatcgcaacgaaaggagcggaatatatcagcctcaccagaaattcacaaaaagccattcagttcatactggagcatacctcaaaatagaatcggaggtttatcatggatgccaaacttttaaaatcaagattcgaagacattttcaagagaagtaacggagaactgtttttcgcacccggccggatcaacctgatcggggaacatacggattatataggcggccacgttcttccatgcgcgatcacgatcggaacttatgccgtatgcgcaaaacgcggagatcaccagatccggttatactcagaaaactttcctgacagcggcattgtctgccttgatctttccgccacagcatacaaaaaagaagacggctgggccaattatccgaaggggatgatccattaccttcttaaagtcggcggccaaatagacagcggaatggatattctttttcacggtacgattccaaacggagccggtttaagctcctccgcttctattgaaatgttaacaggttccattttaagaaagttattcagcctggatgtttccgatactgaactggcgcttatcggaaaaagagtcgaaaatgaatttatcggcgtgaattcaggcattatggatcaattcgcagtgcaaaaaggcaaaaagaacatggccattctgttaaactgcgataagcttgagcacgaaatgattccggctgcttttaacggatataaaatcgtcattatgaatacgaacaagcgccgggagctggcggcttcaaaatataatgaacgccgcagcgaatgtgacgaggctctttcagaactgcggcaatatcggaatatcgcctcacttgcggaattgacgggagaagaattcaacgaactcgaatcccttctctcctgtgaaactttgcgtaaaagagcccggcacgcggtcaacgaaaacgagcggaccctctcagccgcggaggctctcaaatcgaatgatttgaaaacgttcggcgagctgatgaatgcgtcccaccgttctttacgcgatgattatgaagtgaccggtgacgaattagacgcgctggctgaagcagcctggaaagaaggagcactcggagcgcggatgacgggcgcggggttcggcggctgcgccatagccattgtggaaagtgaagaaaccgccggctttatccgggccgtttcatctcactaccgcagcaggacaggtcttgaagcttctttctacatcgcggatataagcgatggcgcggctgaatggagggaaaaataaatcatggcgattctcgttctcggcggagccggctatatcggttctcatgcggttgatcaattattaaacaaaggatttaaaacgatagctgtggataatctccagacaggccaccggaaagctgttcatgaaaaagcagttttttaccatggagatatccgtgaaaaaccgtttcttcgctctgtgtttgcgaaggagaacgtaacaggcgttctccattttgccgctcaatcccttgtcggcgaatcaatgaaagaccctctttcatatttcaataataatgtgtacggtacgcaaattacgctggaggtcatgcaggaattcggagtgaaacacattgtgttttcttcatccgccgctgtatacggcgaacctgaaaaagtgcccatcacagaagacatgcccgaaaagccggaaagcgcatacggcgaatcaaaactcatggcagaaaaaatgctgaagtggtgtgaaaccgcctgcggcataaaatatgtctcgcttcggtattttaacgttgccggcgcgaaaacggacggttccatcggagaagatcatcatccggaaacccaccttatccctatccttttacaaaccgcgctcggtcagcgcgaggaggttttgatattcggcactgactatgatacaaaagacggcacgtgcatccgcgattatgtccatgtttccgatttaatcgatgcccatattctcgctctggaatatttgcaaaacggcggagacagcggcattttcaatttaggatcaagcagcgggttttccgtatcagaaatggcggaagcggcccggcaagtgaccgaaagagacataaaagtaagagcggctgcaagaagacccggtgatccaagcgccctcatcgcttccagcgataaagcgcggaacattctgggctggaatccgaaacaaacggacatatcggaaatcattgcgtcagcatggaattggcatcggcaacatccaaacggatacaaggacaaatgaaatggaggcggcggtcattgaagtttttgaatcagtggcagggtttctgaaagaaagcactgtcttaggcgacataaatgaaacagatgtgatttatacaagaaacagacttctcgatctgctcggactgacggattatgcagaaccgaaacatatcaagaaacaaaacaggcttcactatttggacgaaatggtgaaagacgcggtaaaacggtcaatcataaacgatacgccggctgaaagagacatgctgggaagcagaatcatggacgtgatcacaccggccccttctctgatcaatgccgcgttcagcgaattgttatcagattgcccgaaaaaagcaacagattatttttatagactgagccaaaacaacgactatattaagacgcgggccattcgaaaaaatatcgtgtaccgctcatcaacaccttttggggcattggacatcaccattaatttatcaaagcccgaaaaagaccctaaagacatcgccgcggtaaaaaacagtccggaaaaccggtatccgaaatgcctgctttgtatggaaaacgaggggtatgccggaacaccgcatcaccccgcccgttcaaatcaccgcatcatcaggcttgacttagcgggagaacagtgggggtttcaatactccccttatgcgtattacagcgagcatgctatctttctatcaagcgtgcacaagccgatgaacatcagccgcgacagcttcagaaggcttctggccataacggaaatcttcccccactatttcgcgggatcaaacgcagacttgccgatcgtaggaggttccattctttcacacgatcattatcaaggcggcgcccatgagtttccgatggcaaaagcgggttccctctacccttttcatatgcgtcattttccagacgttcaggccgaagccgtgaagtggccggtatcagtgatccgccttcgcgcaaaagatccggatttgctgacagatgccgctgcgtatgtttttgaaaagtggcgggaatattcagacgaaaccgtcagcatcatcgcaaagacaaatgaaccccataataccgtcaccccaattgccagacgcaggggaacggattttgaaatcgatctcgctctcagaaacaaccgcacctccgaaaattatccggatggcatttttcacccgcatcaagatgtgcatcacatcaaaagagaaaatatcggtctgattgaagtgatgggactcgccgttttacctccccgcctgaaagatgagctggcagaagtgaaaaagtatttactgaatgaacctcatgacatcaaagatattcatcttccgtgggctgaaaacatcaaagcggataaagacgtgacatcggagaatgcagccgctgttttacaaaaagaaaccgcgaatgtatttttacgcgcactgaccgatgcaggcgtttttaaaatgacacccgaaggaattcaggcgtttcagcgtttcacgacgttattggagaatggcagctgaaacattcagagtgaaatcaatcaacaattttttttatcaggaggtattgtgatgttcaaaaaccgattgaaacgtgtatttgtaaacgcaatctgtctttctctcattttcactgcttttacattctttgagaagtctcctaaagcaaaagcggaagccccgtttgcctatggcgctgatataggatggctgaaacaaatggaggacgaaggtgtgcgctggctggatgacggcggaaaacagaaagatgccttgcagattcttaaagatcacggaataaatgccgtgagactgagagtgtttgtgaatccgccaagcagctattattggctgaaagacggcacaacatggaccatgctcggctatagtgacaaagcgggcgtacttgcggcggccaaaagggcaaaagcgttaggaatgaaggtaatggttgacttccattacagtgatgtgttcgctgatccaggccaccagatcaagccgaacaaatggaacggttattcaaacagccagctgcaggcagccgtgtataaccatacgtacgatgtcatgaaagaacttaaaaatcacggcatctcccctgattgggtgcaagtagggaatgaaatgaattcaggaattttactgcccgacggcagcacgaacgatttcagcaaattgaccggcttactgaacaaaggctatgacgccgtgaaatccgtcagcccggccaccaaggtcatcagccatttggcacacggcacggacaacagcctattcagatggtggtttgatcaattcattaaaaacggaggaaaaaccgacatcatcggcgtttcgttctatccctattgggaaggcaagccgtactgggagctcaccagccatttatcatctaatttgaatgacatcgcctcacgctacaacaaggaagtcatggtggttgaactgggcggagatgaaaataatccgaaagattcctactggaccataaaagacaccataaaactggtgaaagcggttccgaacggcaaaggaatcggcgtattttactgggaacccgaagctcactccagcgttctgtcagacgcgtacccattaggcgcaaccgccaaagtgtctaaaaacgtcttgaaatacacaaccgcaatcgacgcttttcatgatgccgcaacaggaaaatgattgatgcgaatctcaagcaggctcattgtgcagcctgcttttttataaggctgtagtgttggcctgttatgaaacagagcaagtaacgaatacggaaagaaaaatacccgaaaacccacgtttcggttaaaaagccgctttttaaatagaatacttcttctgttccccctccttcttatttctgcgcactatctctcagttcctaaataataactttacgattgttgaaaaagaaacaaacattttataatattgtgtaagcaccaccgagcaggaggacgggacatggacaaaaaagaacagctcctcacggatttcagggacttttttaacaagatggtgtggctgaataggctgaagatggaagaaagccttaaggggcataaaccttctgaagtgcattgcatcgaattcatcgaaaaaattgaagacgccaatgtgactaaacttgcggagtccctttatatgacaagaggcgccataagtaaattaacgaagaagcttatcaataaaggccttattgaaagctatcagaagccgcttaacaagaaagaaatctatttcaggcttactgagcaaggaaaagtcatttataaaattcacgaggaattgcacaaagagtttcaagaacgggacaaaatcgtgtttgaacaagtaactgatgaacaatttgacacgatgctgaacttcgtggaaacatacagcaggcatttggattcagaaataaagaaacttggtgcagacatgaaatcggaataaatatgaataaaaccataggcagcccttctccatgaaaacgggctgcctttttatatccctcttattgttgacaaagaaacaaaatcactctattattttgttgacaaggaaacaaagacagcaattttgagaggagagtaatatgtcaacacataaaagaaaggaacttcgggtgccaaaagaagttctcacagccgcctgggctattgcactgggagcaatcgctccaatgcttgactctacgatggtaaacatcgccatcgacaaactgaccaaagacttcaacacgacattggataccattcagtggtccgttacaggctatgtcttagcacttgcgattgcagtacccgtatccggctggcttatgaataaatataacggtaagaaaatcttcatcggctcagtcatcgcctttggtgtcatttctgtttttgcggggatgagccgtgacgtttccagcttcatcttcttccgtttgcttcaaggattcagcgccggtattatgactccgcttatgtcaacactcttggttaaaacggcaggtccggaaaacctgggaaaagtgatggcaatcgtcagtacccctatgatcttcggcccgatcttaggacctgtcatcggaggcttcatcgtccaaggcgcttcatggcattggattttttacatcaacgtgttcatcgttttgattgctgcaccgcttatgatgaaaaccattccagaatttgaaccattcaacaaagatcgtaaactcgatattttcgggattatcaatttgtcattaatgagcgcggcattgatgtacggtattacaaaagcggcggatcatgcatcatttaacaatagcgacaccattttatgggtgggcatcggtcttgtttcagcagtcatttatcttgtatataatctgatccagaaaaaccaaaccgtgctgcctatgaatttgtttgcaaacaagagcttcttatcatcttcgatcgggttgttcttagcgaatgttgccatcatggggccgatgttaatacttccgctgttttttcaaaacattcgtcatttcacggcagccggagcagcactcgctttaatccctcaaggagtcggaatgctcgtgactcgtccgctgatcggaaaaatgattgataagatcggtgcgaaatacgtggttacggtcagtcttgttctttcgctgatcggatctatcccgcttatttttatcaccgataacacaagtatgatttggatttccgtcgtattatttatccgcggcaccagttttggaggaattatgctcccattgatgagtgacgcttatacaggtcttgacagcaaacagcttccggaagcgggtgtcggtattcatatgattgaaaacctcggttccagctttgggtcagctgtgatcgcaaccgttaccgcaactgtcatacaaggattgcagccgacgatttcgaacagtttaaaaggctaccatgccggattcttagtatccgtcatcatccttgcggccatcttcattccaagtctgttccttacccataaaaagactgccatataaagaactttttaaagtaaaaaacccttgcacagcaagggttttagtgaataaaactgatgatggttgccggcagagtcagccaacaacagacaaagccttttactcattcacattgcttttcattaaccattctacttccgttaattcttgtttttgaacgtcttttgtatgttttttcgtaaaatggactttaacagcttcttcgttttcccaaatctcccaaagcatgagtttgcgttctgatggttcgagcggataagcatggaactgaatacagccttcttctttgttcgtttcttcctcaagttttttgaactctttcattatttcattaaggtctttatcactgatgatttttaagcatgccgttatgtaatgcatcgaaattccccctcttcccatctttttatggctttacattataacatcgaaaccggcataccgcattctcaacatataaaaaaccgtccataaaaaatgttggcaatgtttatttaagagcatttagagcgacttttgcagcctcagcgataagagcattattataattggcatcttccgtaaaccggtttgacaggattgccaaaacaattggggctctgtcaggctgccaaacgatcgcaatgtcgtttcgtgtgccgtagcttccggctccggatttatcgccgacttcccatcctgcaggagcgcctgcccgaatcagttcgtcgccggtagcgttgccccgcatccaatctgttaaaatcgtgcgcttgtcagccgtgagagtgttactcaaagcgaaagtcttaaggtcagttgccagtgcttttgcggtgcttgtgtcacgacgatccccgggaatcgcagagtttagatccgtctcgaatcgatcagctttcgttacatgatccccgatctgtttcaatgatttttcaaaacctttgggaccgccaagctgctgcagcaataggttcccggcggtattatcgctgtaacggacagcggcttctgagatttctttcaggctcatgcctgtatccaggtgtttttctgtgattggagaatatgtaactaaatcgtctttgctgtagcggatgatggcattaagtttttcatttgagcttttcttcagaacagcagctgcagccagaactttataggttgatgcgtaagcaaaccgttcattcggccgataggcgattgtcttgtttgaacctgtatcaatcgcataaacgccgagcctggcatcaaattttttctcaagctgaacaaatttttgattcgttatacaacttgtcatttttgtgttttctatagacttcgcttcagcatgcgctgagccgaataaaggattgaaaccggtaaagcttaaacataaaagtccaatgcatagtccaacttgtattcccgctttatttttcacatccagacctcctcattaaaatgattttgtatacatcttctaattaacattacaaacaggatgaaagtcaatatatttcctttgaatgattaaatcctgtattctgattcatccccttatttgcgcttaaatgcgccgcccttgccgtctgaatgtttgcatttccgcttcgtgttcatcatctatttgttatccctccgtgcaaataaaaacggacaccagtcagagcacagtgatgctgtgcaatgatcagtgtccgcaggctttccgtcttggacctatatatgtttctcttgcagactataaaaatcataaggtaagttaacaaacgcattaccttaatcctgccagtcaaaaaattatatcattttatatatttcaataagattattatctggatctctgaaatgagcaactcgtgcacgccattcctgacgatcatgtggttcattgacgcatttaatcccttgcttgtgcagatagtcatacgttttatcaacatcttctaccttaaactgaagcaaaaatcttgattgcgcatctccgtctaaagattttctttcttctccaactatttcagccatattttctcgagataaaagctctattttcgtttctccattatcgaagagtgcatattccatttccttctctaaccaactgattggaagtcctaatgaatctttataaaactcgacgcttttcttaaagtcattaaccaatagtctaatttgcagcaatttcatattgaacgcctcctatcattttactggccattcatttaatcatacaatagggacctgacagcattatgtcaagtttccataaatttttttccatactgcacctaaatttcggatgaaagccttcggagattcatgaaactgcgtttgatcaattcacattcttggtttgaattttccttcacttcaccgtggaggctccggccgtgtaagtcgcgcatccgtaaacatccggccgccgctcctgtaagtaaaacaactgataaatgattgactgaatcgtttttcaccgtcattgcttcccctgttttttgtattctgcgatttccttaggggtagccttccggactccgtctgcgtctgtcctgtttgccacttgagcgccttccatgttttttatctcgctgactactcccaaatgctctaaatacacatgatcaccaatcttgaaacgattcagtttagcccgctcctcggtcatgctcctgtattcagtcgcggctttcatttttaattcagccagacacatttgacaaagggttactgttacagaattgccgttaaaatcagtaaacgaaaccgatctgacagattccttttccgggtgcatcgtgcatgttttcttcataggcgatggccgtgtaaatttaatcattccgcttcctcctcaaaaaagtcgcttcgtccctctgacgtaacagcggatgaatgggaagttccatacacccgcatccgaaccgtcacaatacatggagattgcctttccttcgccggctgacggatattcatacatcctgcatagctgtaaagcctatatttctttatattcccaatgctcgccgcatttccctgttaggatgaagtttctaaagctgttgaccagttgccgcatgttggctccatgcgaaaagccatgtggaccgccgtatcccaattcatacgggtaattttcagccctctcatatgtgtgtatgctttttaaaggaggtgcatcacatgatgttctaacaacccattcaacctaaagctaactcttccccaattcccgatcataaaataagtaaatttacccagaacaaattaatcattttgcactttcaaaatacttatttgtctttcccttcattcctccatggtaatatcttgttgaacctttttaaaagaaaggatatggtcatgaaagttttcgaagcaaccaccctcctcgccgctgccaaacagcgtgcgagtgaatacaaaaaactgcgcggccagatggtcaatctaaaaaaagcgtttcaaggcatggctgatcttggtgacggcgatttctcaggccggggcgctgacaacatcaaagcttttttcaaagaccacgccggcgtcacagacagctggcttgatctgatcgacatgaaaatcgcatttctcacaagccttcccggtaaggtcgaagatgccggactttccaattcgcatgtagaggaatcatttctagagcacgagctcacccatgccctcagtaaatcaaaggcgattatggaagagcagaaaaaggacatgcgctccatcctcggagagatcgaagacattatctcgctcgatctgttttcaaccgaaagcacagatcaggagctttcttcagctgacaaaaaaagaagcgaaacgatacataaactcggcaagctcgatcacgatctaatgaaagaatacgcagaaaccgaagcgaacgaacagttcatccaagctgacttccagcagcttcaaaacgccacgggcaaaggtaaaagcgccacgccgcttcactacaacgccaaagcgtatcgtgaaagcgacatccataagaaaaaaggcgatatcgcaagactttcagatgcttatttgacgattaaaaaggaagaagcgaaagagcgtgaaatcaaggatctgaagaaaaagctggccgatggtgtcaccgatccggatgagtatttggaaatcgcgaaaaagatcggctatgaaaaccttgaacccgctcaggtgcaatatgtgatgcagcttgaacaagcaaaacagctcgaagaagtcggagaaacggcttgggatatcgtcaaaggaataggcgtcggcctttatgatgtcgggaaagacaccataacaggcgtcaaagatctggctgtcggcgcatgggatttttaccttctctctgatgaacaaaaagtcgctaaaaccatatcagctgtattgaacacaccctcctacgcaaaaatcatatggacaaacctggcggattcgtggaatgataaaatggttaacggggatgcgtattcaagatcacattacatcacctacgccatcgggagcattgtcgggctcaaaggttccggctcagctgtaaaagtatcaagcaagctcgccaaaacaggtgccgccaaagtggataacgtcttggaagccggtgaaaaagcggctgcaaaacatgtaaaaacagggattgaaaaaggaaaagactatatcaattccgtttcgaaaaataagtacgaacccgcacttgccggaatagcacaggatattgaaaatactcataatgtgaagaatacgcctttgttgaaaagtattattgaagatcagaaagagagtgtgctcagaaaatctgtgtcttctgacaatagcggcatacatagtgttaaacaaggagacagcagtcctctcgcaccaggcggtggcttagctgctcatgaagcaaaaggcggacaccttatagaaagacatgttggtaagactgatgaagagttattacagaggctacagataaacaagaagatacgggcctcttctagtttcactgataggccaactgcagaaagagtcgctaatgaaacattaactaaacataaaaaggaaattgaagagtggttaaaaagtgatgttaatgatccattaccgttaccttatagaggaaccgaagttataggtagaggagttcgtaaaggttcaaatgaagttaaagatatgactaatgctagaatagtattaaagaaaaatgaagatggtagctttatactaacaggctacccaacgaggtgatatataatgattgaaattaaagtttctgatcctgtatttagatttctcggtggacatttccaccaagatatagagtctccggaagatgcacttgatgaatatttaaatgaagcatctcaaaaactaaaagaaagagatttaatagcactaactgagtttgtaaatagtgatcattcagaagaagacaagaatgaatttatagaggaagcagcggatggtatatactttcctgaagatgatataactccattagaatggcttaagcaagtcactgaacaaattaaaaaacatcttaaaacaacatagttagagaaaaagagccctcttataagggactgaccccataagatgagacaaataaaaacaccttcaagtttgaatacggatgattgttatccgaaattagacttggaggtgttttttctatggggacaagagtgagttatccggttgaagcgaaacagaaggctgtagaaatgagattggcaggcgtacctatgaaagagatcatgcaggagttgaatattaagaataagacacaggttcagacatgggttagatggtataaggctggtgatacacatcgattcgaacagcctgttggaaagcaatacacttacggaaaaggtccggagtattcttccgatttagagaaactgcaggcagagattcgttacctgagacaacagaatgaagttttaaaaaagtacaacgaattggaaaggaagttgatagcgaaacgtcagtcgaacttgtagaaatattgcacagcacaatgaccgtacaggatatctgtattcatttaggtatctctcgagcgtcttattatcgttggaagaagaatctgatgaaggatcatcccaagcgccatttggaaaaacaaatcggcacgttgtgccgagagcacaagtatcgatatggatatcgaaaaatcacagccatactaaaaaagagaatgtgtattaaccataaaacggttcaacgtattatgcagaaaaatcaatggcagtgtcgggttaaggtgaaaaagcgcaagaaggatgggcagccatatgccgtggtcgataatatattggatcggaactttcagtctgatcgtcctcttgaaaaactagtaacggacatcacatatttgccttatggacagaaacaattgtacctttccagtatattagatttatacaatggagaagtgattgcttttactattggggataagcaggacacagcctttgtcttagacacacttgatcagctaccaatgctgcctgagaactgcgtgttacatagtgaccaaggttctgtgtatacatcttacgagtatcaaaaagctgttaaaacaaaaggcattaccatgagcatgtcccgcaaagggacgcccgctgataatgcctccatcgaatcgtttcattcctcgctaaagtctgaaacgttctatcttaacagcattgatcgaactacgactgccatcgtagaacgcactgtcatagaatacattcattattataacaatattcgtattcaaaccaaactaaacaaccaatcaccgataaactatcggcaattggctgtttaaaaggtgttttgacccctgtctcaaaaacggggggcagtcccataagaagggcttcttttattaattcaatttcgctttcgtttttggtccgtaaatgccgtctggcttcaaaccatacatgagctgaatcgtactgaaacgttcagccgcatttactgatgtaagtgtatttgaataaattgcagaaaaaccctcctcgtcttgagaagggctctgacttatacttctttttctctaaatcagtccgaagcaaaaaactgatgccgctcaacttttcaatctgcccctatgcttttcttttgctttttgttttctgattaaatatttttgttcctttattttttctctttattttctattcagttgttttttcttttcttgtttcaagctcctgttttatcgctttttatgccttagttgatatcccgatatttttcatctctttagaagcttgtcgttgcaatctttttgggtttaatttcttagattttgctttaacacaaacctcttcttgtcagtgtgggagagagtctgtaaaaaaggaaagggtctccgcttattttaacaacacttcaagttttactttggttcaagcgcataaattccatcagcttttaatccattcatcaattgaaatcgaattactgcattcgctgtcttcgctccatatgcaccatcaatcccgaagttctttcgctataatgaagggcgacagcgccgttcgaatctgttttacgctctcccctcggattttaatgggttttcaactttaaaaaaccggaagacaagaggaaggatgctttcttgccttcagatgaagagccccctgaatcacttctttatcatcgacggcaaaatgatagcttgtcgattcgctgttacccgacatataactgatttcattggcggccgcatgcgtcatttcctgtattgtgaatgattttcggagtgccgctgtatttgccataaaaaactaaatattccgtttttcaaatacaaaaaaacagctggattaaccagctgctgatcgttatcactttagccgttcagtgatacgaaatttctgtatttctctgaaatgaacaggtttcggcaaagaccgccgccttaaaggcgatgtttatctcccttgcagtatacagcgaatgtacttcaaaatcagcccaaaaagcagttccgtccccaattcgcccctcgatgaatgatgacaaaatcaataaataagcatcgtcggactaaaaggttccggctcagctgtaaaagtatcaagcaagctcgccaaaacaggtgccgccaaagtggataacgtcttggaagccggtgaaaaagcggctgcaaaacatgtaaaaacagggattgaaaaaggaaaagactatatcaattccgtttcgaaaaataagtacgaacccgcacttgccggaatagcacaggatattgaaaatactcataatgtgaaaaacactcctttgttgaaaagtattattgaagatcggaaagagagtgtgctcagaaaatctgtgtcttctgacaatagcggcatacatagtgttaaacaaggagacagcagtcctctcgcaccaggcggtggcttagctgctcatgaagcaaaaggcgggcatcttatagaaagacatgttgggaaaacagataaagaattaatagaaagactgaaaactgatcctaacccacatattacagcttcatctacttttaaagatagggctaccgctgaaagaattgctaattcagttttaaacgatccaaaaaatataaagaaaatcgaaaattggattgatgatcctaaaaaacctaaattaatgttaagatacaagggcgatggagaaataatcggcagaagtgtatcaagaaattcagatctagtagaaaacgttacaaacgcaaaaattatactcaaaaaagataataacggtaactttatccttacaggatatccaaccaaatagaaagagaggaagtatcatggatgaaaggtatgatttcttagatgaattagaaaattttttaggtgcaacatttcatcaagatatccaatcccctgaacacgccttagacgaatttattgaggaaattagtaaagaaggtttgctatttacagtaaagtattgcgaagagtttctaaatagcgatctaactaaacaagaaaaggaagacattataaagtgtaatgcagaaatatatttcccgacaattggcttaccgcctatagaatggttgaaaagtgtaatagagcaactaaaagaggctatttaaaagaaacactgaaaggcccccattttatgagagggcctttttatattgataccgaatttttcggctttcttatccgatagaaatgcaataccgacagtgcggtttggatctacttgacggcatcactagctgaacttttcaacaattttgcccctaaaagagatacgaacaataaatttcgagccgaaaaatcaagttcgccaacaacttgcgaatttgataaaccggctttattaagggaaagtaaaaaacccttgctacgcaagggttctggctatgattccgactgggctcgaaccagcgacctctaccctgtcaaggtagtgattatcttctgatacgaacagatgttttattttaaaaccttattttataaggttttctgaccagtctttctgataaaaaatcttctgttttggctaaaaatgaacaagttggtccccaattcgtccccaaatcagatttattgacaacagaactaatgttcgtatatcatccttgcaggagttgaatcgcaatgaccgattttgaacggaaagtatatcggattatttttaacatgacccgcttcgggaaaaatccctccatggaacaattgaaaaggaaaaccgggaaagatgagcagacgatccgtgctgctgtgaagaatttgatgagacagcgcattttgaagtgggataaactaaagaaaaagtggatgttttgacacattacacattacaataaagttaaacaaaggatttaataggagatatatttgagtctctttataaaataggtgcctattcgactgctaaataaaagcataaaaaaagcttacataaaagtaagcttttttaagagaaaaaattttgccatttttcaaaagccgaaattaaattcactgagttagaagcagtcttaattattgaatctgctgaatctataaaacttttcaagactgctttctttggtttttcagcagttatctcagaattagctgcgtccacaagctcatttaattcttcttgcttttcaggattcaattctgaattttttatctcagcaagaagtaatttagttacttcctcgaattcagtatctccctgattgttgttattcaccactgtgttattagaatgcgaaccaaaactaattgcagttccatttgggttatgaactgtattatgaattgttttatccacgtagatgtaaacccctttcattttctcttcaaattgtccgttagctatcagttcttccatagttttttctttatctgttagactaactggagcctcccgctccagttttcgttcaagctgggcggtttcttttttttttgacattgagatataaaataatcagtgaattcaaagactaacaagaagttctctggctctggaacaaagtctatttcaccacaaatacagtcaaaataatcctcaatgttctcttccaaatcaaaagatcgaaccttatgattatttggacacaaaagcatttttttaggtattaattcaaaatcctttttactcattaaatatcttagtacaagatcataagaatcgttatttactccgatagcgaatagaacattttcaacagtgaaatcttctattggaggatcatttgcagcccactttgataatacactattaatatcttcaaaatatactgtgctcataattccccctccaatagttttttactaattaatcgatatgtctttttctatagtttccgcagtagacgccgcctcaattatagaagccatttttttatcttccatatcaaccttaactaaaacatctaaaacatgatcaacaacagtctcaggtacttccttggcaaacttaaaatagccctttccataattaacttcaaaagtggtttctatttctacggaagtccttggatcagtatatttgaaaatacacttctcgtccattttatgatctgttggataaccaagctcatttattgcagtagtaattatgttaaaggttttatcactatttaaatcaacgcctcttttaccgttaaattgaatacttcctacactagtaggaagtgcaatgtgactggaagaaacacctgccgaaagatgatcacacattctttttgcgttttcctttgtcaatttcggaacggtaaagtgattacagtcttttgaataacctataaattctaacacttgttttctatatttaacaatatctttaaaagcacatctcatttgcaatagaggcttatcagcaaatattacaacaatagagataaaatgagcataagagactttcatagaaccgtatcctttttttcgagttgagcttttttcttctacaaattttaagtagacggcacttccttcatgtttaattgcacacaattgtaattttggtctaaggtccggctcccactccgtatcaatttgatttgttctaagtcctcttttcccaactaagaatttcaacagtttttctggagtatttgaagtctcaggaaaggggtcttcaagttcacacaacgtcaaatgcttacttgaaaacttaaattgctcatctaaatatctcaaatcatcccggtagcctttttcagaaagctcgtcaataatttcaacagcgtcacggttaaaaaacttaactttttttgtttttgcaaattgatttaaaattgtgctcttttcaactatatttaaatatttctgcatatagacctgcccttcactatatccaataataaagagcactaaactatacttgaacagtaaacaatggtagtatcaagttgtctaaagttaagtgctcgccccatcttaatgatggggttttcttattcaatattaacaaaaaatttacagcagttccatcttttcgttcaaatctctctttacttatagtaaagaaaagtatgacaaaaacttcaatcatcctacggccggtacttcttccgggcgacttccaattcttttttcagtgcttgtacatgtccaagcaaaaacaatgcaactgtcccaacttttaatcggcttgagcttcccggctgtcacaagggtgcttaaacgctgccgggtgactccaagcagctccctcgcttccgctacagtcttggataaacttaattttttcgcttcctttcatgtcgtttttctgaccaaatcataataagacctttgaaaattgtgaggatcacagccagatataaaattacactcgctatcattcccgaaagcgataagtttttagaatcaatagctacaaggccaaataacattattagaagcatggccatttctgatgtactgtacttgctgagataatctttcattcgaaagtggatgagttacagtataccgcaatacgtttttgcggcataccgcaatcccttttaatgtatactgagtgtatattcgaggaaacagggggtttccccccttgaaaaccttgaaacctgcagttgcgcttctagctttgccggcggaagcgctttttctttttctctcctcgctgcttcttttcattttggaagatgtcataaagctgtttgcatattgtgacaatccccgcaatggaaagtacccagtttctaaactcatccacttaaccacctcctaatacaaaaattataccatttttatccgagacaccaatatatttcataaaaaaaccactctaaagagacggatgctccgctagtcatttttacccaaccacttaaaatctgctttctatcaactttattcaagagcaacacaaggaataaagacgcagaccaaatgattcattttctccttttgaatcgtacagcgacctttttcttcattcttccatggtaaaatcttgttgaagctttttaaaagaaaggatatggtcatgaaagtttttgaagcaaacagcttgttgaccgctgccaaacagcgtgcgagtgaatacaaagaactgcgcggccagatggttaatctgaaaaaagcgtttcaaggcatggctgatcttggtgagggcgatttctcaggccggggcgccgacaatatcaaagccttttttcaggaccacgccggcgtcacagatagctggcttgatctgatcgatatgaaaatcgcatttctcacaagccttcccggcaaggtcgaagacgccggactttccggttcacatgtggaggaatcatttctggagcatgagctcacccacgccctcagtaaatcaaaggcgattatggaagcgcagaaaaaggacatgcgctccatcctcggtgagatcgaagacatcatctcgcttgatctgttttcaaccgaaaacacggatcagaagctctcttcagctgacaaaaaaagaagcgaaacgatacataagctcggcaagcttgatcacgatctaacgaaagaatacgcagaaaccgaagcgaacgaacagttcatccaagccgactttgagcagctccaaaacgccacaggtaaaggaaaaaacgccacgccgcttcactacaatgccaaggcgtaccgagaaagcgacatccataagaaaaaaggcgatatcgcaagacattcggatgcttatttgacggttaaaaaggaagaagcgaaagagcgtgaaatcaaggatctgaagaaaaagctggctgatggtgtaaccgacccggatgaatacttagaaatcgccaaaaaggttggctatgagaatctcacccctgaacagcttgaatttgtttcatttctggaacagcgtaaagctttcatggataacggaaaagaagcattgcaaatcataggtgatggcgccaaaggtctgcttgttggtgtatacgatcttgccaaggataccggtgaaggagcacttcaactcggatggaatatcggttggacaattgacaacttaaacaaagatcctcaaaaagttctggatactgttctggaatacgattatctaggtgtctatcaaagtatggttgacacattgaaggatgattgggataaaaagatgattcacggggatgcatatacacggatgcactatgttacttacttgggcggaagtcttctgttattgaaaggcggaaagtcctctgtctcaacaggctcaaaagatcttgctaaagttgggaaggcggctagcgaaaagattaaaaatggcaatccatctgtcaagccttatgccaatagatataccccggcattagaagggattttacaagacgccgggaatactattaatgttaaaaatacgccgcttttaaagagattagttcaatcaaaggatgatttgtttactaaagccgcaccttatacttacagagatgaatatggaaacctcaaaacagttaacttaaaaatgggccatctaaaaaaccaaaaacaccctaaaactggagttccatataataaagacggtttcccaattttcaaagcaaaatttgatacaaagattgattccaaactttataaggaaagcgattatttacaatttaaagatgcaaccttaaaattaaaagaagaaattgaaagagatcctttacttagaaatcaattcaatgaccttcaaatcgaaatgataaaagctggtgaaacaccagacggatatacttggcatcatcaccaagattcagggagaatgcaattagttgaccaaaaggtgcatcggcaaacaggccatacaggaggccggcacctttggggtggaggaagtaagaacagataggagttggtcaatatgacagagtggagattcgccgaagaacctatcggggaaacaactgttaaaaaaatcgaaaaggctttagatattaagtttccaaacgactacatttcaactatattaaacaacaatggagcacgcccaagtaaaaagatttttgactatgaaaatacaaaaggcgcggtttttaatcgattacatggtctaactgaggatagttcaagttttattttagaggttttagaagattatcaggatggaagaatgctttcagggatagtccctttcgcctgtgatcctttcggtaatgaaatctgtttcgattatcgtcagaataaagaaaatccctctgtggttttctgggatcatgaaattgcttatgaagaccctgatggagctttgagtcatatatctgattcatttaccgatttggttaataaactatacgatgaataaaaagataagtcccttctcataacgagaagggattctcttattttagtagagcttcaagcttcgcttttgttttcggcccgtaaatgccatcagcagtcaggccgtacatcacaaaaaaccctcctcgtcacgagaagggaatcattcatcatacaaacgatacttcttaacgctctgcctctgatttttttcagagcttatacattcaccaagaggaaaagcaggcatttacctgcttttagaacaacaatagattaatagcataataaacaccatcagcaattattttggccgatcctccgccaatcttacccttcaaagccttaaatagcttgtccgaaatcatatgtgcagtaacatcgggaagttcagctatttcatctatcttatctgctatgtagcctgaattctttttaaatgcttttgctgctttagcgtcggcatgttttaatatttggccaaccgctgctccgccatgtctaattcctaaggagactgtatttgcagctaatttgactagatagcctttaatgccggtagtgtggaacactggctcctcactctgttcctcagccaaattgttcacagtgttagtttgaacattaacactctgtgttgttcctttagtctcagtttgactattaggagttgcggcacttgcaacgcttggtaatagtgttgatactaaaagtaagcctgtgagagacagaataattacgcttgacataatccttttcattttaccacctccttccaatatagtattatatactaaaatttataatttttgtttaaaattagttaaaaaaggagacttatcatgagaaaaatttacaatcatatgaatgttgaccaaaaaaagactgctattaaattgtttaaagaggatttagaagaactgaagaaggagcagaaacaggaaggtgaaaagggttaccctcgggttgtaagagatgcaattgaggaaactatacaacggtacatacaagatatagaatacctaacaaatgacttaaaacaaaatgagcaggcctaatgcctgctcattttcatttcagaagcgcttcgatctttgtttttgtcttcggcccatagatgccatcagcagacagaccatacatggactggaaccgtttgaccgcatttgctgtcttcgcgccgtatgcgccgtctattccgaaattctttgcgttcttatccgggtagtaatgaagagccgccagcgccgtttgaatctgttttacggcctcccctcgggtcaatgggcttgtgactttaaaagtacccgctggcaggcggaaggatgatttctttccgttggatgaagagccggccgaatccctcagctttattacctggccgactctgattagattcggattcttaatgccgttcaagctttgcagggttttcatgcttactcctgttttctctgcaattacagaaaggacatcgcctttcttgacggtgtacgtcgccccgctggtctttgaatctgttttttgtggtttggatgcttttttacctccaaggcgttcaagttctgcagcaatggccgctttcacttcatcccagcgccccgcatctaaaatacggtgcgggcagtatttcccattccagtcctgatgctttctgattttgtcaacgccccatccgcgctcttgaagtaactgagcgacaaacttgatagccagcgcttccgctgcttggtatcgcgctccgcctgacttgctgtagcagatttcaacaccgatagacttacggttcccggttccgtttgtaccgtcgccagaatgccaagcgttctggtccagcggaatcccctgaattacttctttatcatctacggcaaaatgatagcttgtcgattcgctgtttcccgtcatataactgatttcattggcggctgatgcgtcgtttgctgtgttatggatggtgatatactccggcgtcattggattcgggcatttcagggcgtaattttcacttggaactaatctttttttgactgcaattgtcatgaaaaatctctcctattctgtttttggattcaaaaaaagcagcctgattaaccagctgcttgatcgtctttttctgttttctgatcgttgtcgctttcaattacatggagccggtcagtgatgacggccgggattttaacgccgatctgtgccaagttttctgtgatggacaggccctcatttgcgatataaaaaagaacggttccaaatgtcagaacaccgttcaaatttgttatcgtatcaataatgtttgcgacgatgaccaccataaaactgagcatcttccggacatatccaaaccacgcgctacggctccggagctgcttcattttccatgcttttataatgccagtgatgacatccaagatgctgaggatcaaaagcaagtcaaggtatttcacctccccgaaaagataggttcttgcgatctgtaagctctcaaaattcatccacacgtgtattccctccattttgtcttcacctcctccgaggcaaaataaaaacaccctctcaggtgttaacagatgaaaattctatttatttttcgtcttttctttctcgagttctttttttagaattgttatttcttcatttgcttgctttaatttattttccgtatatgaatgaagagctttagaatcagctaacttattatagagatcaccaatatctccacccaaagcattacattttagcgccaaaagctcacactgttcttttaatttttccgagctcaattcactgttcatcttctatagaaactcccctctgtttggctgttatttcatcatattccgcttgggtaatccatcctactgatactgccaaattcatttgcttggtcgtaacagtccctttgccccaacacctatcaaaatacttataagagttgcttttattcatttttgtaatactccctttaaagcaagctcttcaaacagttgattgacaagtatttgtgttaactcaatatctgatttagtatcgtcttcacctgaagatccctttatgatatggggtgttaattctttcaaaactcatcagccctttcacctgagtgatattcattattagaagcagcaccttctgcaatttgtatttgaaaatatttaggcagctcttttaaatcctcatttgttgatacagggaagtcgtcactttttgtaaatgaaaccccgtacgtgttgccatctggttccacataaaattcgagcaatgtccagaaaagcctctcgggtttgacaccattaataccaacgtcttcattaccctcaatattcttgatcagataatactcaaaatcacttttattatcttctccttctaatatcattaatttatatagagaaagagtatcttcgctttccaatgaaaagtaaaccgcatccatttgagtaacagtttcgtttgcctgtccactatttaaaatcaatttgaagtttgatacagttaccgccccggcatcttcttcaatttttaaacctttcatttttatgtcatcagctctatagttgaccatacccaacatatgaagcgcctccctaccttggttcgtaaatatacagaatcattaacctaccgacactctgaccttctacattaaccgttccagtgccacgaactctaaaagagatagttgctgatttatctccatttaaggtcatgctgggcacaccgcatgtcacgcagtctgaataactcccgtaagcttgtactgtagcgaaaaaaatgttttcaacatctgttccaatacttagagttccatcaccataagcagtgctcccgctgcctttatttatattgaaattgtcccaataatgaaccctgaggatcgcattgctttgtaagtctccccttacatcagttacagcgttgctgagggtcaagccaagagcttgggaagatagtttcagttcattcccagcctccaaacgaacgttataaggcaaatacaccgaatcgccgtaatagcccatataatttccatcgccgggtaaggtatcgtctctgtcaattttgaacatttgctttgcagtggcatccccttgatattgccacacttcaaacccaaagcgttcattctcagaaccagccttatccggacccctcccggtaaatattgcaacatttccccatttcgtagtgctatcattcgagttttccacaacaattttaggcacatttgtatcgtttggtgttgctcctgaccaatttgcaaaataggtcgatcttaattctaatctcccgtcccactttccattagcattaggtgatccacctataattgtttttctatctacaaaatctgcatttaagaaaggggcgctgtcagttccacttatttgtttcgctaatgtcagataatccttcgaccccattaacccaattccccgttttgatgtattgccagacttccaaacaggcgtcaaagagcctattatatcgtagttaggtttaaggtcatcagtacctggatcgtaaaacaatagattatagttatacatttgtatcgtttttctgccgtttaattcagacgtaatagtgccgtctttcagctcgatcgtatccccggaatcattttcacttcgaacgatgacacctgagagaataccacctttgatcttgtcggctaccagactattaatttttgcattcgtgatagctccgttcgccacattcaatgtatcaatagcagcagtaccaatttttgcatttgtaattgataaatcctctatatgattcgtaccaatacgaactgtggccgctgaatactggttagtgaaatcactcggtgtacctttagtattcaaagctcgaatgcgataataccaaacctgatcaacctcggcgtcatgaacgcaaccaccgtcttttcctcgccatatcaaagtagcgctagacggaacaaaaccattcatctgagacgcataaacttcgtatgcagcaatgtaagagtaaggttcgaaatcccatgaaagagatacttttgaaaaaagccctttcgcttgaacatttgtcggaacaggtggttttatgtctgggaaattttcatcggttattattatatttttaccaatattatttaaggagtcttcaattttatccagccgcgtgtctggttcataagcagaaagaaattgcccgatttccactacacaggtattatctggatcagttatgtcgtattccatcgaaataacccgttgcgatgtctcaattgggatagcgaagtttcgatcaattgctatcgtagtatctcccaattccacatgctcatgttcatatcccggaatgttttgaagcagttggaccgacaactcataattaacttctattttggatgctgtggttattaagtagtcatatgttgcttttaaaagctcttctggatctgttatattctcgttgttgtattcgccttctctgtgtattaaaacgtcatttttaagccggcccagctgttttaataaatccggatcaccaacccattcctggcctaaaggcttgtcgaccggatcaccttttgattttttccattctacttccgcaaagtcaataaaacgggaataaccgcccgtttcttctccgtcatcatcagtagatgcaatagatgccccgtatccccaaagggctgttactggatagctgatgacagttcgacgaatatttatcgtatccttgtcaatctcaaagcgcttgccgctgtccttaccacgtcgaggaagtatttttatgattcttctcgtgaccttattcccgtcaaattctatagtgtcctgaagctcgccgccccatatattgattacgtcagcaatacaatccagcgctgatttcttataaaaggtagttgaatttactccaagttcaacttttacctcagccacccaccttgaccgggaaaggacattatccagtacaaactgcgcagttttgttagtggggcggaaatctttgactctggtttcagcaagctccatcatggccgcttcacacgtaaccagagtgtttgtttccccttcttcgtctgtatcatccatttccttgatgacaaacagacgcaagttgccatccttatccctgaacactacttgattctcttgaaaaaggaatcttgcgtcaggatgggaagcatctgctacaaaagaaaaagaagaacccttgttaagctcttctttatattttgcctcccagaacatgcaggtttcttgtccgtggctggacagcactgtcaataattcatcatcgggtgaaagtatatacatgtcagccatggccggacctccttacaaatatgcctcattaaatttgatattgctcttatgactgaatttgattttcactggcgtctttggcggcagctgaaaccaatccgattgaatttgaagtgctggcatgatcaacttaccgctacatgtcacctttcttttcgctgaatcaattatgagagtgtcaccagcgatgaaatcgtacagcagcttgatcgttttcgataccgacccatcagcattaagaagagccacctcatatgaagtggctttctcttcaaaaacgcattcgattgttgggtctacagctgcatagcccggattagtaatagtttgaacacctgaatcaaattcaaaatccttcgccgggccgtatttttttggatcgggacagataaaagtcaatgttgcagtctgaaagcctccctgttcttcaccttctgaaatgctttcaaagacagcattatagactctgtcaggctcatcgtaaaaaattaacggcttaggctcttcagtgtgcagaataaaagtcaattcctcctgctttttcttcagctcttcttcactgctgaaggcgaaaaggacctcaatggttatgactcttacaggaattcttgtattgcgcaggaaaccgccggggcgattcccgatagtggctgtattcacttctcttcctgtcactccccggccgcccgtggacttcacataaaagaagggtgatatatcaatgccgtcaaacgtgattttccattggttaggcagcagttcctgataattaatcaattaaatctcaccctccttgcgttcgatcttctttgtgcgtctgtgactggcttttctactccttgaccgaccttcttgctgtccatctcaaccacaatcattctgtcaggcaattcaaggttccggatgtccgcgctcaattcttttctaacagtgccaagttcaccgctagaaatggaagtgtcatattcaaaattcatatcctcttgctgaatagtcatagcatcactgacggctcccatggctttctggacagtgccgataccgttctgaatcccgacagcgataccagcaggaaccatgataccgaccttgtcacgcattacccttgacggagaatggattcccaaaagttttttcatgccgttaggaatagcatttgccattgattttactttgctcgctaatgctcccgccatgccgctgataccttttattaacccttggatgatgttcttaccgatctgccacaagttaatgccgcggaaaaacttcatgacaccgttccatatgcttgtaattgttgatttcgccgatttcattacgctggaaatagcatttttcatactattgaataggcttttagctgtactcacgagccctttccagagccctgtcacaaaacctttgacagcgttccacacacttgtaaaaacactcttggtgccattcagcatgccgctaaaaaatgacttcaacccattccaaatgctcttggcagtagaagacacagctttccatactgtggtaacaacagtttttatcgcattccaaacggtgctgaagattttcttttgcgtatttagccaacttgtgaagaatgttttcaatccattccagatagtttttccaactgatacaacgcccttccagatcgaagtagcaattgttttgatgccgttccaaatgcttgtgaatgctgttttcattccattccagagtgatgaaaagaatgttttcaggccgttccaaatgcttttagctgccgatacaattccattccaaacagtagagaagaacgactttattccgttccatgttgatgttgctatcgtctttatacctgtccagacagtagacagccaactggaaatagcaccccatgccgcaattgtagccgattttaccgtgtcccaattcgcgatgatcaaggcaaccagaccgatgacagccgccgtaatccatccgataggccccattgcgatgacccaagatgccgccatgcgtgccgcctgtgctgccgcttgtgccgcaagcacgacgagttgccggccgaataaaaccatttgcttaccgcctgcaaccagcaaagatataaaattgctgatctgcgccgccgtccaagccgctgccatgcgagttgcctgcgctatggattgcgctgcgagcacggtcattttggcaatgaaaagacccatctgcttaatcccgtttgtcagcattgtgataaaagaggtgatcttcattgctgtccatgcggttgctgtacgggcagcacttgcgattgattgagccgccattacagtcatattcttgatccataaacccatttgaacaatgccgcgcttcagagcagaaacaaacgctgatattttcatggctgtccacgatgccgccattttcacagcattagctgttgcgcttgctgccatcgctgtatacttcgcaatgaattggcccatagcagctattgctgattttaattgggtaatcaatcccacagttctgatccctgaaaccgccgaaccaaagctccgcaaatattgagctgcagtcataaaatctttaagcccatttgtgagagcactaaccgctactatcgccggaacaatagctcttaaagcaccaattaatgaaataccggctgcgataaatttcccgattgccgggtttgcttccatcgccgcattagtaaatttcaaaaacccgtttacattctccaaaatcgtttgaccaagtggagccatgccaacaagcaagttgatgatagtcttcgcgatctgccccaatgtgctccacactgtgggcccgttggtcttgatataatcaatgaaagattgaaattcttttgttttcgtaacgctgccagcccactcattgaaccgcttggtcagatctacgagtgatgtcatcatgtcttgagacataggagcgaatccagtaaacagctttgtcaggccgcccgaaaagtttctgataatctgcagcagttttggaccattggtttttgtatactccacgaaagcctgaaatttctttgaagaacccaagttcgctgaccatttcacccatgattgggtcattccttcgatagattttgtcatgctctttccagtcggtccgaatgctacgatcagattgaaaactgtccgtaagacattcccggcagatcggccgaatgaagcaaacgccgccggagcttctttgttcagataagaaatgaatctctgcatgtccggagctttaaaagctttgtccatgcttttcgccagtcccacgccctcttttgccagtccatcaaacattggaatgagtgagttaagcgcgagtttaaacgtatttagagacataccgaatgttttcaagatcggcttttgaaccatcgtaccgatgtcccgccaattgtctttaaagtcttcgaggttctttaatgcctctctctcttcttttccaagagatttttgcagattattgatctgtttcatgattttagcgcgctcttttgcgcttgttgcattgtccagcttctcctgcagctttgaaaggtcttcggatgctttaaatacaccgcttattgaagtaacagcaagggcgccgaatgccgccgcgcctgttcccgctgttgcaaatgcactggttaaccccattactccgccggctgccaccccgagcatagggcccaatgacccgattactccggttatgctggcaagaaccggagtaattgcaggcaatgcggatgtgaaggcgccggcaagcgaatgacctatgacagttgaaacagagttagtgattttggcgagcctgttcattgatgtttcaaaccgatcaattcgggcttcgatgtgtatccaaacacgttttggcaaggaatgtgtctctgttctggctactgctaccgctctcgttaaattcgaagtatcaccgtttatgttggttgtgactctatttcgcaacgaagctaaagctgtccgtgcttctgacacagctctagtcagaggatctgaatcagcatctaaatcaactcgtgtgcgttcatgtcgatgtacaaaattatcaatttgctgctcggcctgccgcactctggcctgaaagcttgcgatctctgcgtcaatttctactgtctgatgatcattcatccggcgcatcatatcattcacatggtccatgctgcgagtaaatcttcgtgtctgcgcttcaactattgctgtcaatctttcgatcaattcctcaccccattccttgtccaaattttgcaaagtggttgcggattgtatcattaaaccgctgaacccctttagctcgcttgccgagctcgtttacatctgtcttgcgccatttgtcgttatccccagtgatgttccgctccaattgacgtctggccttattcgcatcaaacattttcttttctttggggcgcttctcattcatagcgtaacggtgaaacatggcgtttcttgccataagctccaattcatctatttctcgcaacttggcccctttgagcagaagcttgtactcgttaggagtccatgacatgattaaatccacatcataaaccccaagccaatgtgcggaattcgtaattatttggtcatagtcgatcccgttctctctttgtacgcctctttcatcatcttcaggacttccttgccgttctcttcgtcctccagccgtttcgcttccatttccggtgtttcgttcggagccggtttcttccctttgttcatcttctccatcatcttccatcgctgacggatcacgcctttgaaaaaacccgctgagtccagtgttgtgaatgcttcattgatcattttgtcaattgcctcgcctgtctcgtcttcatcaatgattttcatgattgcttcttcaatagcctcagttgaaggcttttctttcttcaagtaagcaagtgcgcaatcccaaaaagcagaaagataggaagcctcttcgttgagcaggctcatgtaaatattcattgtgccgcctttgcccttttcgtccgcagtggaatatttttcgtttgccaatctgtcaaaagcaaagtcgcagcgtgatttgtattctttatctccgatagttaagtaagccatttataaaacctccgattatttttgtatgttaaaaaagagcccgggaagcccggcccctatgattccttttctgttcgtatcgtaaaattggccgaacgttccgattccccgaccgagttcactgccgacacgttaaaaatgtaggcggtgtccggctttaggttaggattcgacgtgtacgaattctttgagacagtcgctatttttgcataaaacctgtaaatattgtaagatgtcgcccctttcaccgcatcccatgaaaaactcacctgatttgaagtggcgcttttcgcagttatattgcggggaacgttagggcgtaaccgcttgtgtttgcgtaacaatctcagtcattgaggactcacccgcatcgttcacagcagagacgttgaccgtgagtttcgtatcggccgcaattcctgtcaaggtgtgggatgtgccaatgacagttgcgtccagctgcttgctcgctcccctgtataccttatatgaagttgccccatctaccgcatcccatttcacggtcacgctgtcagctgtagccgtgaacgatagattttggggcgcattagggcgtagttgtttttttggcattctcgccaaactgcatgaactctttggcaccggcagaagatctgatctcgtcaattaattcttgaggcagaggatcaagctcacctttacgggtcttaccgagaacaggcaatgttgttgaaacctcaataaacccatcttgcggtgcacttttttctaagttctcgatgattgcatgtccatattcagaatcatgcttatcgtttttgtttttattcaggtttactttccatacctgaactgtctcttcgttgtcataagcatcttcaatcgccgtttgacccggatcagagacagcagcataatatgtcagttcgatgctctcagatttagggccgtacccaacaattcggccagactttgttgattcatcttttgtatcttgttctttcgtatgactgccttctgtttggaatgcgataaacagaccttcagttgaagtagcattcatcggttgaacaaagtaaacctcatcaataccattcaataaatctgccattttgttcatcctctcaattgtttattgtgaagcgcattctgagaatgccgtgacgcgtgtatccgtcaatatcagtgatcacctgcatgctgcgcatctcagaacggcataaagaaaagccctctattgttaggggcctgcttgttaacgcttgaagcatgaggctcaaaatctccatcgcttctttttttccgttgtaacctgaccagcagtgcagaacgacattgatttcttcaccgctggatgtcttggttttaaatggggaaacatcatcatcccccattgttacataaggcttttccagatctttcgggactgcatcaaagacgcctgtgacgcgcccgttcagcttttcgtctgttgataacctcttaaataaagcagcctgcaacgtccacagggcagatcgcatgatgacagctcctttctatcacatttgactggcaaaataccgcatgccttcgtccatcgctggattccagaacggctgtgcccgcattccccgcgtgaccacccatctattaatcttggtgtcataataaacccacggcgtttgccggccgccgccttcctctgcgtaaatccctgttccgtattccacatatacggcataatcggcaccaacagaaataacggcccgtaagccgccctcttggtagtcgatttcaattgaatttttcaggttccccccgtctattgcggcggtcggagcattcagaacagcgtggctgtaaatcagctcggccgtgtctgtgaccagttgcttaatatcatctatgacccggcttctgaactcgcttgtggctctttgcatctgcctgacccatctaccactgacctcagccattgcccttcagcacccccgtaacctgacatttcaaattcataatctcatgcatgccaccctggtcgatcggatctgatttgagagtcagcaccttgttttcgtagatgatccgcattgtcttctcaatatcattgcgatacgggaaatacacattgcaattaaccggattctgaagctgctgagcctgataatattcccgggacgtaatcccgccgacaaaagcctctgtggtgagataatcagtgattttttcaacatagcccccgccgacgtccggcaccttttccaaccgctgaaacgtgacaacatgcgggaattcttcatagatcatcggaatgcctttctgtatgggtacagattcttcatgatgtgttgcgggaagtccgtgttatacgaatacgacacatcccccatacttctcccagacagaccagacggcgtcatattgtattcagccgctttcgcaacaaatattttcacaccagcgggcagcgcttttggatcaaaagtatttttgcattcgtctgcggcaacctcaattaaaatagggacaacctcagacaaataatcgtcatgcttatcggtggttatccctatcattcgttttacttgttggatgtccattggatcaccctttcaattttgtaagcagagtttcacgcttcatgttgaaataaccgggtatctcctgctcttttgcttttctcttcagttcatcaagagtcattttgtcataatccatagttttcaaccgtcgcattctattaaaagaagccagacccatgaagaccggcccccttacagtttgtgtttaaatgcaaccatacgaatgtttttaggctcgtatacacgtttccagttagaaggatcggctaattcctcattcgttggtgcaagcccagcgacattgtttttcacgaaacgcacgccgcgtggatgtaaaaggaagtgttgacgattaatgagaatgtcttcaccttgcaagctgtcgcggtctacttcggtaggtgttggcgctgctccgttcccgaggccgattgctcccgcaccaaataaatatgaagtatatacttttccgccttcctcaagggtttcaacaggcatgctgtcatccacaataacccgcttttcttggtagaatggaatttttgcagccgcctctgaatccttcacaaattcaataaggttctgcttcttcatttccgcataagtattcgagtgaacgccgattgcagtcaatttattctcagcatcccccatcacatgtgttgcatcaatgaatgtttcaccattgaaaacaccatctgacaaagtagaaatatcaagaatattgtctttcatcgttggtgaagcgaacacaccttccagctctgctaaaagtgttgcttgtctgcgtcgtgcccaatagcttgccacaagcgcagcgatcgcggccattggatcactaccagccaatgattttgccaactcatttgctccccatgctttaccacgaagcaaaagcaccgcttcatcaaaatctgatgtgattttttcaggtgtaagaggtgttttgtcagataaaacttcgtcctctccctctaaatcatcccaaaaaggcatttgaatagtggtaccgcctgaagaggctaaacgatccaattccggattatttgagataatcccgctctgttgtaatgctgataattcggctgttctttgaattacatatgggttaaaaacctctggaacgataacgtccgctattttagttgttgccattgtcatttctcctttattttaaattaagctgatgttcccggatcgcctttttcaccttttggacctcgaggaccctccgggccttgtggtcctgtatctccttttggcccctgcggacctgctgggcctctatcacctttagggcctctttctcccgctggtagattcacattgcgaagaaaacgcggaatgcgttttttcatgccttcacacccccattactgtgcttctttttgcaaacgcatcgctaattctggattctctctaaaaaggcgcccttgctcagtcagattcaacgtttctttcttaaaagggtttgcaggcgtctgcgttccggattgaccggatacatgcggctgcctacctgctaaagatggagcgcctttttgatcttcctcaaaaagatagctatcgctttccctgagagccgttagctgttcgtcaagaccaatcactttgccgtcacctaatttcaaatcctcaagatttaaattggctttaacagccttgatgttttttgacttcgcatcacgtaatgctgattcaatcgcgaaatcaaaagcctgctgatctaatttttgctgatattcagcagcagtcttctggttttcttcttggagactttcaatcgccgcctgaagctcttcgttacctttagcctgcttctgcaaagtgttcaactgctggtcccgttcgtcaagctggcttttcaagtccttcttctcattgttgactgcatcaaaacgctccttcgggaaccattgaccgttactgacaatatcaatcttttgatctccggctttttcgatcacctgagcatataaatcgtcaccaagcaattcttttaaactcatttcattctctcctttgatgtttttttgcgtgtccacctcacgcacaggatttacgtttgtttttgctctaaacctttaaaacgagcagcatgcggcccctgaccgtttcaccctcttaaccgcttgttgcacccctcttctatgcaaccaccgcatatttacttgctatctatagatttgtaccactcttcataggtttggtatgggattgtctggcctgacccgctaccgccttccctcgcccttctcgtatccggcagagcgccgttcactttaaacgcaattgtacaacggcagtttatatcgtctttcgcattattcatgtgccccggagccggaccgacaccgccgtaaattgatttgaagagtccattgcgttctattgtcttcccgtccagcttcctgtgcccggctcgtgttttaagatcaagggtagcattccacattttttcaagattgctccgctttgaggctttctcagcgctttccattcttgccgatacttgtaccctatgagcttctgttctcgccacgtcacgggctttccggcgggcaaattcggttgctctttcaatgcggcgggcgatctttgaataatcctcccccgcttgtaggccctgtgcgacggaaatttgaatctgccggacataatcgtcgcgatgccgcctgtatatcgctgacaaagtcaattcagctatggggtttagaatggcctgccgaatgacttcggctgtcgggatgctaaaacccaagttaaccacggattccatttcaaatagataagcagaacgcatataattctctaaaaactgcttggctgctaatgcctcaacaatagttagaatggttttgaaagccttgtgagattcctcggccatcctctccatttccttgttcagacgattgtatttgttggcatcggctaaagtaagctggccgtccttactgtatttcgcatacagccgggcaatttgtgcattggtctcctttaagcgagatgcaaaaacgacatcaatcttttgagcatcctcagtgatcatgtcgtccaggtacttatcaatatcattctggttcatcttcatcaccgcccacgtctgtttccacatccgttaacggcggcatgctgttcctgtattcgatttcttcagattcaattcgcttcatttcagcttctacatcgtcaacccatggatgatgagcgagacgagtttctttgcttaaatcagtgctttgattacccatctgcacctcttcaagttcattggtcatacgtgaacggttgaatgtcatttgtaagagagtgtgatcgtattccccttggccggtcatccgcaaatattcagtaaaaaaccaaaagaaggcatgcaaagccggacggaatttcctctcagcttcatttgccttcagatcaagtaaagaatataggtttttaattgcaacgttcgtcggtgaatttcccactttgtcaggattattgttaactccctgcccgaaccggtatatattttcttcaagtcggtcaaggtgggtgttcgcgctgtcaatcggtacttcagcagttttcatatccattccgccatccgaaccgacttcaacggccttgtaataacgaagatttgtcatgaactcgctcaaatcttgaccgccaaaatttttaagaatgtatatgaagtcttgcatttcatcaaaagtatttgcgttgtttgaaatgttgctgttgtactgatcaattaaatccttgtaaaaaacaagatcgctgacgccttcttcattgttcttgaactcgattaagggtacttttccccacccatacccggcattccctaaataaaaatggctctccggattttgttcgtagtcaaaatcaaggacaagagcgccatcgtgcatgacgtagtagaatgtctgctcatccgtgtacaattcgaccttacgagtgtattcatcatcaatgtttttcacatcataatacctgattgcatacaggagcttccgctttttcgtggtatcgtataccgcaatgacctcttcagcaggaatccggataaaatcaaacttcccgtcttcatcaacaaacgggtggagccattcactgcctttattactggcgtttttcaaaagctcattcattacgtcatcaaaatcttcgtttacaaagtcattgaccaactccaagaactttgaatcttcagcattaaaagtgattggtttcccaaccaggtattgcactttctgttggaccagcagcttgtgccagttatgagaaatacggttattgggcttttccgtatctatttttcgtacgccattctcatagaaatagcgcagtcttttttttatgtcggcctgattcatgtaatatgcgacgccctcaagcattcggtcacgatctaattcgtgtttatcaatcatcttttgaataaccgtagtgtccggcagagtatctgatgtttctgcactgtcctgaatgattttcaacagctcttctgtgtgtgttggggttattggatacaatagaaatcagctcctttctttttatctcgtcatgacccgtacgcccggtcgcttcatatcccgttcaaaagcataacgggtagcatctatagtgtggttgtcagcgtcctcaagccgcgccttcggattaccgtctctgtcagtctgatagtcgatattctcgaattctcgggcgatattaggtgttctcaacggatcaataataatggcgtctaaatcatcaagccattcttcgccatattgaaccgagtcaggtccttttttcgcgcctgtaatgcgccggatgccatggtctattttcaattcatcaatacttttaggttcggcactgtcagcagtaatttcttgactctcatatccttttgacctgatccattttgccagctctctgttggaaaccttttgatcataaagctcatcaatcgcatagatactgttccgcttcttgtcatagtgccacctgacataagcgagaggatcaggaccatatccaaagtcaacgccctgccggatgttgtcgaaggagcgaaccatttcatcagtaatgcagccgttctcgattttcaaattatcaaacggcacaacaccactccctaacgcttcgccgagatattcccatctgtactttaatgggttccgttccttaacgatctcagcctcttccttaaaggcttttgagatataaggattttcgagatatgttgaatgatggatatatgtgttctttggtacgaatgaagattcatattttttgttaacccacgattgctttcttttcggcggattgtatgaatagtaaaaagcataaaaaagaccgtccgggagttcagcccgcaggacggaattttcgatcattgaaatttcttcttcaagtttaaattcggcaagctcttcgacccacaggaaggcaaccggaaattttgcgatcttgagtgatttgatttttgccggatcgtccgcacccctgaagatgatgctgtttcccctgggtttgtacgtgagcctcatcggcgatttattgacatgccagtattcacccacgcccagcagatcaattgactctttaagctgctcgaaaaccgattcccctaatgtgttggcgactttccgaaccacaagtgtactgaccgggtatttcatcatgtcgttgactattcgggtaccaatatgcgtcgatttcgaagagccgcggccaccctttaagacataccggaggtatttgtgactgttggctgccgcccagaacgatcggaattttggcgttacgatgtccgatattcgcttaaccttcgtcaacgtcttcacttcctatatcatcaatgatcgtcacgccgctgtcttttggagcgtctttctcgacttcgttccgtgttttctcgatattcaagcgcatttgttccagtttaaggcgccgctcatcttgctcatgcgccagctggtcaaattgcttgatcaagctccggagctcgcccattgcccgagattgagcgttcaggaatgttgcatgacgatcccaagcgaattgaaactcccattctcgctcatcgccaaacatacctggcttctcttttttcaaaactttggttacatcatcttgatcctgcacaaacataatgcgttgcgcccgtagaatggccgcgtattgaatctgaatctggtcccatatcatatcagcaggggaacgctcctgaatctcttccatgatttcaagcgtttcttccggcagatactttgagaagaacccatgtgttacagcgttttgatttcttgccggagccgccccgccgctatttcctaatgcgtttttgttgccgggttgcccgcctatttttgtgtgcacacttttttcaatgggtgcaccctttttcctttcccaaccatgccgctgcttccacgatttaatggtgttcaccgacaccccgtacttctcggcaaggtccttgtatttcatgcctttgacgtaatccttatacgcctgaatgtgcttttcagccatctacattcaccgccgcccccttctgattcgtgtttgttttggaaaagatattccctctaaaccgacgccgtactcagaccgttaaccaccaatagtttttctgagatttatcggaatcagtttacagagaacataaaaaagcatcctgaggaatgctttttagtagacactaatgttatctttaagaattttaaagtctttgtctattatttgttcaccaattgtttttaattctccatttattctagaatttttcacatcaatagaacgagtgactatttcaatgcctgtaataattcctattaacccatcacatatagcattatgtgcctcttgcaatacttcgggtggcttttcttttagcactttttttaataagttttggacttcttcagacgcccagtagtagctttccaataatttctcaagatctcttctatcggaggtaattaatatattggttttacctttaatagagcttaattcagttgtgatttcagcaatttttctctttaataaatgattagccaatgacagtattctcacctcaaccatattgaaaatgaaatttttccgaatgaaagaacctatcataaatagatgcagtcgttagaataaaaaagcaccccaagggatgcccatgttatttaatccaatctcttaattctttaattgtgttatatgttttagcccaaacattattttgctcaaggtattccataccgtcaaaagtaatttttgcatgttttaataatgtcatttttacagggttacccataccagctctaatgacagttgcattttcaattaaatttttacgttgcatcatttctacaacttcaccaaaaaactgaagatctgcatcgtaatcggtatatctaggctcaatacctttgtccatctcttttaaaatactataaactagttttctgcgatccatttactcacctcccaccttattatcggttaaggagtaggagaaaggaacaatccgcagaatttgtcgagcgaaagcgcccttcataaataggtggcaaccgtaagacgaaaaaagcacattggattactaatatctatatggtattttagatttattaactgagttttcatcaagatggtcataaccattcatttccaaaaatttcagtattccgtctttggctatatccatattattcttcggcccaattgttaaacctttaattgcacttttatcatggaatggtacagtaagataaggaataaaagtaccatttgaaactctgcaagaatagtctaaatagtccggttcaacagcctttggaattaatgctactctgtactcctcttcttgagaaaaacatgaatctttaaaaaagacagaaaaaattttcacatacaaagacaagaaaccattttgataactccattgcgaccattgataagggtcatctaatttgttttgaaaaaacaaataacctccaataaacttactcattagctcttcgatcattttcctttgtgttttttcatcataaacaactggaaattccaatagatcataattatctaaatttaactttccaaataaatttttagggtcaagaacaatattataaccatcattatttgtataattagaccaaagtaaatttgaatctgaatttgtagtgagtgacattacatagacaggtttttttaaaggtttagattcaataatatatttaaaatggtttaagaaactgtcttttgattcgccgcaaatatctgatattacctcttcacataaattataagtgtacaacagttcatttttatcgttcaaaaagtttgcatcagatagccaaaattctttacgttttaaaattccttctaccccatagatatttgtataatgatagagtaattttattttctttttctttttgctttctataaattcataaacgaaattgcgaaaatcctgatggggctgtattgtctttggtttaatatcttttaatttcaaaaccttaccctcccagtttattatcggtaaaaggataggaacctttgcaaaatttgtctaacgaaagaatcgttcggcttctgagattctaccggttacacccgattaccttaatgcttcagatgtcgttatgacttcttggcccataaactttctcaactcgtctatactctcaaaaataaacttagccatttcggaggtttctccattttagggttatattaattatagtcaataccaaccagatcattgccaaaatcatagtaataatatcgagagtgctgagatgaccataattaaaattagtgaacaatatcacaaacagaataaagaataagatcgttgaaccatcgattaattttttcatatttgctcatttccttctatgtttttgaaaatccaaaatatcctctttcagaaaaagcctgtcccgaggcatttctttcatcggctctaattccccgcttttaactaactggtttaggtattgacgagtgaagcccaatatttcaattgcttcgcttgtattaacggtttcctcatttaagaaccgtttaattgcatcgcgttctttaagattgtacataatatcatcctctttgaattccctaatttgtaacaataaacaataccattatacctataacaatagtagtctttaaaggattttttgaaaacttttcttatatttcaataaataaacaacctattcatgctaaacagaataggctgtgatctgctctatttttcattttcaggcgagaacgttcgatgttcttctgcacggttccttttttaatccccaataactgcgctatctcttcgaatgacatgttttgcacagcgtgcatcatgaaaatgtctttttctctttcagtaagtactgaaagagcatcagcgattctttccttatcccaatcacttacctctccctcagcttcttgaacgattgcgtattcttccgggaacgcatcaattaagcgcggatcagcaagaatcgtcctttgatatgcgtctcttctgtcagcgcctcggcgtgcgccgggctgtcttccgttctgcagccattcaagagtgaattcaatatcgctgatcatgctactgataatctttttgtcgtttatttgttcagccgtcagattaacttcagccgtatctttgtagagccggtacatttttcttgtttctcttaaagctcgtttgtattcaatgattaaatcctgcattctgattcctctcccttatttgcgcttaaatgcgccgcccttgcctcgtttaagtctttgcatgttcgtgttcatcatttgttgccagaaacgatctgagcgctcctgcgtgtttttattgggctttttctttttctgcttcatgtcatccctccgctcaaataaaaaacggacaccaatcagagcacagtgattatgtgcaatgatcagtgtccgcaggctttccgtcttggacttatttaatttgaattatcctcagttagagaactattaatgtctgaaagatttgaaatgttcaatgtgctaggatcaattcccattaaatgaaaagctaattgggcctgtactaatgaacgtaatttttcatcttgaattttatccgccaagtctattgattcttttctattagaattttctaatacactatcatggtattcctttacacgtatccgtagcttttgtgactcctttaagaacataagtgaaatcccttcaaaaattaaacttccaacaacactaattgcactactaacagtgttgtctgagccaacagcaaaaatgatgatacctattaaaaggataaaaccaactatagacataattagaccaacatagaattgcaaatttgaatgattagtagcttgttgttgatatatacccaatgttctttcatatggtttttcatgaagttttttataaggtttttcatagggtctttcataagatctttcatgagactttacttcttgttcttgtttcatcacatttttttgtgcttcttgttcttctttttcatcgagattcttagtatgttctttaagaaattcaaattccctcaatgtccttaagtatctctcttcatgttttctctttataagtgtaaaaactgtgactaaaaaaaaggtaaggccaaaaaatattgacatcagcgcagaaagagcttctggtgaatcaaatagagacaaaacatccttcaaaccatttcctcctgaaaccgattatttacaataaaccctattttatcatatcggcgttaatacgatttctattaatagttaccctttctcctctttcttttcatcccgtcaccccatcaatcccggcaggacagcgacagcgaagaagaaaagccccacgcatgccccgaccagccagatatttgttttatcccgtttagcgataatggtatggtcgccaatcatttttaaatcgtcagatcgagcgacaagcgtcgggatgttgtccgggtgaacctttaaaagctcggccgcctgctcgacggtcattgcttcgtccttcgtggccttcacgttccgctggagttctacttgtaatggcatcattccgcatcaccctccaattcgttttgggcaactgttatcgcgaaactcagattagtaatgatcttttctaatgcctgtttgtatcgttttctatccccgcttagatgctgaatgtccttttgtgcctgtcgaaattgatgaactgttacttcctgctgacgcttgttttcctcgatgatttcctgctgcttaacagtctgttcagcttgctcaataagccaagcaatttccttctgaggaatgtatgtcagttttttcagacgttcaattctttctttcatgcccgttcctcccccgcagggggaacccctgctatttgaatttatggccaatctcgtaatcacaacgagccaggccgccttttattgtttgaatgattgttttaccgtgttccgggacgtccattagatgagcagtcccttcagtgccatctaaaacgatgatgcggactttccccggctcgatgctttgctgaatagttgtttcctgattttttatttctgttggcttgttcactctggccgccccctgtgctatgatagaagtaccagttcatatcaaaggcactgaggcgcagcttcggtgcttttttacgttttacgacggcagccgcatcgttaatccggcagatggctttaattcctcacggtagatgattggatgcttttcgacgtatgccgccaactgctccggcgtcattttccactccttaactggaccagacttgtatggatcaattttttcttgcatgttgttgacctcctgattatttgatttaggatctctacaaaagctacctgtcatgacacaatctcagttataatgacttccacacgtggctcttcactgtaaaacttactgaccttcaaatcgactacctgactatcatccttgtatatcagatgatttaaagcgtctttgacaccttttacatagttatcgacgtccggctttgttacagggcgtaacagccctttctcagcgttctcctttttcctcttggatccggatacagctttcggcatcggtctgaatactctgacatccattgccacaggtcccgtaataacttgttttggccgatactgtgacgccaccagtgcaacatattgtttaaaattctttgatttcaaaggatcatgcattttaaccttgccatttataacagatcccctcggcctcccctgtgcaacaggctcgccgtaaactataaactgaatggaatccaaccgtcattacctcccgtcaatttgttcccagtgctgaatctgcttttccttgtacggcgctgtgaggataatggccggcagcaggataaccgctttaagcactgtgcatcagctccatttgtttgattttttcctcaagcacccggatcgccggggtaaggtcctggccggccgtttgctcggcgggcccgaacagatacataccgctggttgctgtgaagttcgctttttccgtcattcccaatctcctaacctatggtttaattgcatccggtcgcccttgatggtcactgtgtaatctctgcacatttgatgaatgcgggagcccagcgcctcgtcgatgtccaaaatttcgaccgtatcaagctcggaagagattagcagaggcttgtgattcaagtaccggtaattcacaaccgattgaatttgttccacttgccaatccgtcgcccgcggcccccccttcactggtttgaataagtcatcaatgaacaggacctcggctttccgcatggcgtcgagctttgtttccagctggtcaaagtcatttcgcagatcgcccattccctctacgtacgggaaatacatgcagtaaattgattttttcttgatcagattgttcatgatcgccgttaacagatgcgtttttccgctacccggctgcccgagcaaagcgatactgtttgaacgttttcccatgatgctgagaaaatccttatagtattccactgcgcactcataagcgtccttgatcatgtccggcttcccgttcttaatgaagtttccaaaaaggagcttttcgaattcctccgtgatgccgctggccttcataagccgggcgatctttttccgcttcacacactcgcattgcttggaaaatgtggttttccattcccgggccttatccggcaagcatactttcccagccaggtaatcctcttctctgaccatttgatcgggggccaggctctccattgtcatatgctcttttctcagctgacgctcggtgtcttggtgaatccggtaaacgataatgcccttatccttgcagtcagagcactcatattcagccttttcttctgaggcggcctgtcccgttgaagatgctgctgaccgatcccggagcttggttagaatggccttcattgccgcgtccatatcttgcgttttgcgagcttccatactgctgtttcccctttcgtctctggctaaatgggtttgagaggattgcttcaatgtaattcaaattgacgttgttgcccttgcttctgaaagcctgtttcattgcctccatgactttctcttcgccgtaatcatccaccatatacccgagccgctgaacctccatcgtgccaatggtacgggctgttttgttttcgaatagttcaaatgcttttttcattctttcgtcaacctcctgctgtcctaaaggtattggagccgggcctatcttcttgttataatttccaagctggatgtactcggcataattcaacaccgtcacaatgaaaccgcgtttttgcggcagccggtccagcttcaaatactcttgctttaccatccgatctaacgagtatttgatctgatcagaagaccagttgaaacgcttggctaaatctacaagcttaacgattgtctgcccaagctttagttcttgatctgccctgtactccgcccgtttgaataaataatcgtatattgtctcatcacgtgaatccttaaatggcagccgaggtaggaccacataccccaaaccttgcaaatccatgccgctcacctacttcctttcacacagtgctgtcagagccttgaaatctatttctactaatctcagagacggctcatttgtctttaagtagtcagtcgtgtaccgggtatacaagtcctttctcatgtggcgctgaaccgttttgaccagccagagataacaatgtgggatgggaatcctgatcaactccctttccatcagctcaccaactccgaaaaatggatgatgctgttcagttgattagtggcccggcaatacttgcatttttcgcatcgctccggcttctctccgccgtgtttcacttgcaaaatccgatccatccgctgctcaatctcttcaagctctacttccatcctgccttcatcaatattgatgacagctttatcaggtggatcttcttttgaaacccctacaatcaggggctcaagccattcgttacgcccagtcattcttttttcaagctcagcatacagtgccatttgtgcaatatagccatttgcctcgacgaatgagcaatagcctatttccggatgccaaaccctctcccggagtgaacgggctgttttcagatcggcaaaacggctgccggcagggttgtatacgtccagcttgcctttccatgaaacaccgaagagttcggccgttacgataacttcctttgctccttgcagaacgaacatacagagttcgtcatgttgaatcgcttcaatcatcagatcagctaactgatactgcttgtacagctggcccttttgtgtaaaaagtgatggagtgttctttttaaattcatcaaaagcctgttcaccctcaagccaggcatgaacgtattggccgaagaggagcgcctccgatgtaggcggtgtccattctccgttcagctttgccatcgcggcagcctcgcactgcaaaaagcttttatattgagaatttgacatgtagtatctatcaatctcgttagagtaataattctccttgttcagtgccggtatccgcattagcaggatcacccgccttttctttactatcagcaggcttgtcagcttgctctttctgctttttaaattcttcctcagcctttgatttagtcgcgccagtggccttcacattgaagtaatcctctttcttcgccatcccatctcgcagtgacgtgtaaatacggccaattttcaggaaatcttgctcagtaaaggcatcaacattacttccgatgtactcctgaatcatttccttagtgatgccaaactcttttttaaatagggagaaggcgcttctgagccggtcttccagtggttccttatgaccgctaatcaatgttttttgacacatatctaccgccgcatcaacgatgtctcccgggatcactccaagtatgcaggcgcgaacccggcgggctccttgattggcaaccatttcgtaaatatccctcggatcatcaagtttggtaatggagcccctcgccttccgttcatgcttcacagtgaaaattttggtttgccgggtattcgtttcaagatcccaagcgtaagccatgacagatgattcaccggccttttgttccaactccataattccgtaatcaatgttcccccaattctgagccaaggcctctgccagccggatagatggaccggagacctttgtgccgccacgaggatattcatacactgcattctcggccaaaagcctccgttcgcatgcttttttaatccggtcaaacgccgcgtatacgtcccgtgggaatttctttgcgatgaccattgccgcctgtacttcttgagcctgtcggcttaccatcgcttccgtagtcacgccagtagcctgctgaggcgctggcatgtaatctgagtaatctacctgtgataatccattcattgtgcttctgccacctttcttttgtaggcttccgttccaagacgctgccattctcggtatgcgtccattgacgggaaggaaaataccggtttgcctttactgaacatgatcgagccgccgacttgtctcagacgcttctgatcgtccgcccggtcactgaaagatgctgttattcgtttaaccatgtgtaaaacctccattgtcttttatgaggtaatttggtataataaaggaactaatctttaccaaaagaccttttgaagtccactctgccaagtgggctttttttattgctcatttttaaattcaaaaccaagatgctccttcagataccgctcaaggttttccctcaagatgacttctccttcagcactatctatcacgtaatcatcgaaagccgttacttcatccccaaagaaatctttttgcgtttccggctcagtcagcttgtcatgccagttgttcaagaccatcgggttttcaatattcatcgcgaacacctactcacaacactcaggtgaatcccgcgggctgccatatttaaaacggtttgatgtaagtgccctttattggccagcctattaatatcctctgcaataaccttgatgctccctgcaagactgatagcttcttcgtaatcgccatcccgtaacgcctccgaaagcaagatagagagctcttccgccgactcgattttcctttttgctaaatctgcatctgctttaagaaactgattgattttcataccagcaccgcctgcctttcttctgttttcgccattgcaacctgacacattagcgctttccgtgtccacctttcggccagttctttcatgttcagtccatgactacgggccagcgaatatatcagcgttttgtttgccgggatcagatcaaaaatctgcttaatatcggccatgggcagttcttcaggttgtcggcctggcctatcgtttgccagccagcgcgctaaatgccttgttgcttgcaatgcttcttcaagttggtgaaccatgttgattaccgctgcgcttgcgctctcattaagagctgggtctattggagccgccgttgtcgggtgcagccgaaaaagataatgtacgagatcaatatgttcataggcctcacacgcctcaaaccatctgatgcataattcgggggtcagcttactaaaaccattttcaacatcggaaacgtaacgttgatccttcccgcctatcaaactgccgatctgatattgtgtaaacccggccgctttacgaacacagcgcatgatcttcggtaaattccgcaagttgtacggattgttctccatatgtttgcctcctgatatattcagctgtttgctgttaaaatttaattagggtcaaaagatgttttattgtattggcttatgattttttcgaatatccggcctcatgtctctaaatttcgctttgtggccacaataaaaacgaacatttactctatagagcctctttcatgattgcttgttcttgagcttcgatccatgcatcaatattgtgtttggtaaagaaaatccgatttcgcacacgaaagtgaggaatttgtttttctcgaaccattgtgtaaattgtgtcatggtgaacacccaggtaatcagcagtttcttgaacagttaatgtgttacgtatcataatcggcctcctaagcaacgcgtcatttactcgtttcgtgtaacttttgatcaaaaaaaatctcatcgacatctttattcaacaacttggatatttgatgtgctttttcaagacttggctttgtacgacccatttctatattcgcataaccgcttacagatctgtagccgagctttttagacataaaggtttgggtctttccttgagaaattctggtcgcccgtaatttttctaacactattaactcaccaccttactctttttgtgtaactcgttaaacccataataatatacacaataagggtaagtcaatatatttttattctttttgtgtaagttattatctgttgtgtgtaaaccatgttaaaatttacacaccaaatgaaaaaaggtgtataataatggataatataacagggaaaattctaactgaattaagagaaaaaaaaggttggagcaaatcttttgtcgcaaaaaaattgggtataaaaacaatgtctacatatgcgaattgggagtacggtttaaggaaaccggatggcgagatgcttgtgagaattgcaaccctgtatggtgtaactactgactatctcctaactggaaaagaacctaatcaatttaatactgaccttttcgatgattctgatttacaactcgcctttagagaagctcgtgatttctcagaagaaagtcaaaaacaggcaattgattttataaagtaccttaaagagaaagaagaacgcgaaggccgaaagcctaaaaagtaacatactggcgaaacccttatttatattatttattatgttatttctgtttactaataagatctgaattctcttccggattggtcctgaatcccttctggaaagttaatatttacaagcccttccccccttataaaacaaaggtttcagcatttaatcccttccggattctcttccgaactgattcggaattctcttcggaaaaaatcaggataaatccgagtgttaaactcgattacataaagaaatcatcattaattaaaggggcatgcaaattggcttttacatttaaaaatgaagaagtttataacagtgtagctaaaaagaaacgaaaggcaacagggacatttagaaaaacatactatgctgcacaaacattgctaggacaaaaaaatcaagtaatgattgaagttattttcggatttttgactggtccacaggtcagtagtcaaggattaattatcgcaacaaaagaaaatttacatcttgtaactgataaagctggaggtcacaaaataataagttggaattatgaagaaattataagtatttcagttctaaagcatacttttactggttttacacttgaatttaaaacagttgatggtgattacctaattaaaagtatcatggaaggtgatcatgaaaaacttataaattatgttaggaagtcggttgtcacagcaaacaaaaaaacatccgctgaaaacacttctaaacgtaaagtcgaagaaaacccaataaattctgattttgattttgttgcttcagagatcagaaaatatgcaaccttgaaagatgaagggcttattaccgaggaagagtttacagcgaaaaaaaagaaacttttgaatatataaagtccgaattttcgggctagtgtcatcactcagaagaatatgaagttatctgtaacaagggcggttgataaaggtgcttgagcaaaatattaagttatatgttgaatcttatttatcccaatataatcaaataattgatagtctatataggacagcctactcaacaaatccagaagcctttcgtttaaaagatagatccaacataaaaatttatttgataaagttatcttcacttctagggagcaacaataccttacaactctatttaaccttcgaaaagaacaaaaatcttgaattagaaatagttgatctaacaaataaagaactttacgaagattattcaagctttagctcacttaaaaaatttatatttgataaatcaggagaaaaagatgggttaaaagaaaataatattatatatagcgacaatatctctttttacaaaaaatcattatatgaagagaaagatgatttcgtttctaccctagactccaaagagtggcaggaaactataaatgcgcaaatgcatatgttagcatctgaagaaggtaaaagttttattaaacacgttaatcaccctgtaagttactatgcaaaaaatgctgctaggtattcttattctcttcttgatttaaaggcgattatagatacagtaaatgacgaggattttagttatcaaatggaccaagctatcgcggcttacgaaaattctttatacctggcctcttgcgctactttaggtgtatgtctggaaacgttgtgtaaattgttactgaaagaaaatggtgtaaaggtaaaagatagtgatggcactatgttagacagactcggcgagcgtttaagagaacagaaaatcatcagctacaaattcaaaagccgcatagatgtatgctataaagtaagaaacttatcttcacatacaagtccaggcaaagtgttgcaaggagattgtcattttattattgctactataaacgaaattgttgatacctatttcaaatgagaaagtccgttcagggcttttctttcacaccaaaaacagaacatatattcccttcatggtggtgtttttaatgtcaatccagttatcgtatcttgaagaagaagtgaaaaaaatctattacaaattaaatattgagactcctgaagacattgatttagaaaggattgccgcggcatttcgtatctggctgcattatgagcaaagagaaagctgcatgtttcaaattaacggtgagtatagcgttgtccttgatgctcgtgcctctccacaagaacaatggcaagactttgttcatgagctatgccatgtcttaaaacataccggaaaccaatttcacatgaatagaatgttcaggcagcttcaggaataccaggcgaacagtttcatgtatcacttctgcgtaccaacgttcatgctcataaaattgaaactgccccgtcttaaatcagaggccattaaattaataggagatacatttaatgtgacatattccttggccgctaaacggatagaaatattcaacagaaaacagttttcaattctctggcataaaaatcttcatcaaataagtaaattgaatgttaggaggtagccaaatggccagtatagagccccgtggaaaaaactcttttagattaattgttgagaatggttacgatgccaaaggtaaaagggatagaagaaagaaaacaattcgtatagaagatccaaagctattaaagactaaacggaaattacaagagtatcttgaggaccagctgcaccgtttcagaattgaagtagaggccggcgagtatattgctccggaaaaatccacttttgattcatttgcagaaaaatggattgaaaagaaactctttaataagaatggtaagccttactcttttacaacatctgttaaatattcaaatcacttaaaaaatcacattcttccagcattaggtcataaaaaaatagacaaaataaaaagccttcatattgttgattttatagatgatttatctaaagatggggctagaaaagatggaaagcctggcggattaggtgatcaaacaatcaaagatatttttaaaatcttacaagcattatttaaaactgccacagaggaatggaaattgataaaagacgatcctattgagggattgagttcgccagaagctgagaataaagaaatgaactttcttgaatctgacgaagcagctgaatgtattaaagtgttgtatgaaatagatattaaatggcgcttatattatcttgcagctctgatcggggggcttcgtagaggggaagctcttgcctgtgaatggcacttggatgtagattgggacaaaggtggaatatacgtaaatagatcaatttctaaaacaattaacggagagcctcatgtcaaaagcccaaagtcaaaaagttctcaacgattcgtcaaaatgcctgatttttatatgaatgagctggctaaatattatcgcttatggaaaaaagaaaaattattgcttggcgatgcctgggaaggcggagaacatcaatatgtgtttcacagtggtaaaggaaaaccttactactatacaacccctaccgcaaaatggactaaaatcaaaaagaagtacggtctaaaagatgttcgtcttcatgacttgcggcatactatggtggctctccttatggaagctggcgaaagtctcagtgctattcaacgaagagctggacatgccagtgctcgaacaactagtgatatttatggtcatgttaccgagaaactcgaaaatagcacagtaaaacactttaaccagttcgatcctagaaacctagcacaaaaacagagttaattttgaaattcctcttcaaaatcagctcaaaaaaaataatttcgtccccaattcgtccccaactcgatgaatgatgacaaaatcaataaataagcaaagtaaaaaacccttgctacgcaagggttttggctatgattccgactgggctcgaaccagcgacctctaccctgtcaaggtagcgctctcccagctgagctacggaatcatgatatgtatgtgttgctgggtatgttgttgtctctctgacatttataattatatatcctgatttctcattcgtcaacactttttttatctaaaataaaaaaagggcgcgtcgcaaaattgacggcgcccttttcgtttatgatctcacttgggcaggggttatttttttcaatgcctgttcgaagtcccgctctaaatcttcggcgttttcgactccgacgctcaagcgcagaaggccgtctgtgatgccgcgtttctccctctctgctttcggcatggcggcatgcgacatggctgcagggtatgagagaatggattcgacggcgccgaggctgacggcaaataccggaagcgatacgttttcgaccagctttttgacggcttctttgctttccaattcaaaggacaggacggcgcccgctccgctcgcttgccgtttatgggtatcggctcccgggtgtccggcaaggccgggatagtaaacgtttttgatggcgggatgtccgtcaaaataggcagccagccgctcagccgtccggctcgctttttccagtctgacctgcaatgtttttaagcctctcaatacgagccagcagtcctgaacgccgagcaccgctccaaatgaattttgcagcttatacagctgattgccgagctcttcatcttttacggcggcaaggcctgacagcacgtcgctgtggccgcttaaaaatttcgtcgcactgtgaagcacgatatctacgccgagatcaagcggacgctgcagagcaggcgtcataaaagtattgtcaaggtatgtcagacagccgtgatcctttgccagtttgacgacgcccttaatatccgtgatgccgagcgtcgggtttgacggtgtttccatatagatggctttcgtattcggccggatggcgcgggcgaccgcttctgtgtccgtcatatcgacaaaggtatgttcgatcccgaaacgggacagaacctcagtcaccatgcggaatgttccgccgtacacatcctccgtgacgaggacatggtcgccttgggataagagcagaaatgccgtcgaaatcgccgccattcccgagctgaaagcaaagcctctcgttccgccttcaagacctgcgatcgtttcttcaagcgctgttcttgtcggtgtgcctgagcggctgtagtcatatgtcccgaattcttcaaatgaagactgatggaatgtggaagcatgctgaatcgggacgctgacggctccggtggctccgtctgttttaaatggattgtgcacgagctgggtttccagcgtccaattgtgattactcatatgacacggccccctcttttacttgctgtaatgcctgctttacatcccgcttcaaatcttctgcatgttcaatgcccactgaaaatctcagcagacggttgcagacgccgtttgcgatacggatgtcttctggaatatccatgtgcgtctgtgtcgcggggtatgtaataaagctttccaccccgccgagactttctgcgaaacagatcgttttcagcgcctttaaaaacggattaacccattcctctttttgcagccggaaagacagcatcccgccttttccaggatataacacgtcggcgatttcttcttcctgttctaaaaattctgcaagttcacgggcgttttcttcatgacggcgcattctgagtccgagtgttttcatccctctcattaaaagccacgaatcaaacggcgggagaacggcgccgatcgcattttggtgattaaacatgatctcgccgagctcttcatcctttacgacagcaagaccggcaaggagatcattgtgccccgctaaatattttgtggcgctgtgaatgacgatatcagctcccagttcaagcggacgctggagcaccggggtataaaacgtattatccacaatcaaaagcaggccggcttctttcgtaatccgggcgattttttcaatgtccgcctcctgcattaacgggtttgtcggcgtttcaacaaataccgctttcgtgttttccgttattttggagcgtaaacagtcttcatcgctgaaatcatcgtaaataaagcttaagccgtattttctccattcgttttcaaacaaacggtacgtgcctccgtataaatcggaggatacaatcaattcatccccgcttttaaataaagccataatcgtttgaatggctgccattcccgagctgaaggcaaagcctctcgcaccgttttccaacacggcgatagcgtcttcaacgagctggcgtgtcgggtttttcgtgcgcacgtagtcaaaacctgtagattctcctattcctctatggcggtaagcggtggacagataaatcggcggactgaccgttcccgttgcttcttcgcttctatttccgatttgggctaattttgtatcaacatgctgcatcatcagtaagcaccatcctttttcaaaaataaaaaagccccctcttcataagaagaaggagcttttctcttcctcttatcttccaagcatgtgaatcgcttgctggatttagcaccttggcactttgccttcccgcggcaaagcaaaccggttgctgaggtttcaaagggccagtccctccacctctcgtgataagaatattgttttgtattttctgattgttctatattaacgcactataaaatgaatttcaataactttttatttatctgaactctcgcaagaagtgcatctgaagaaagaaatttctaataattcatggtacaataggaaaaaaccatcaagacaagaagcggcctggaggaatgcgaagtggcatcaaaaaacggaatcattcatgagaaaaaacttttctcccatgagcttgaagaggaaatgaccgttttggtctacctgcccgccaccttctcccccctgtataaatatcatacggtcatcgctcaggacggccatgattatttcagattagggagaatcgggcggcaggcggaagagcttatgtcaaaaggggaaattgaccgctgcatcattatcggcgtcccttataaaaatgtgcgggagcgaagaaacacataccatccagaagggtctaagttcgcctcatataagcgattcatcgcaaatgagctcgttccttttatcgacaaagaatacccgacttatcaagtcggatacggccgcaccatgatcggggattccctcggcggaaccgtttcgcttatgacggcgattgactatccgaacatgtttggaaacgtcatcatgcagtctccgtatgttgacgggcacgtgctggatgccgtccggcagtcggaggatctcaaacagatttccgtttatcatcaaatcggagaaaaagaaaccggcgttcacacgacagacggccaggttcttgatttcaccgcgccgaacgaagagctcaaacagctgctggaaagcaaacagtctgaatacacgtatgaaaccttcgacggggatcataaatggacctactggcagccgctcatcacgccggcgctgaaaaaaatgctgtaaccattcatttaaggagggaactttcatgaaatacggtattgttttatttccatcaaaaaaattacaggatctcgcaaattcgtaccggaaacgctacgacccgagctacgcgctcattcctccgcacctgacgctaagagatccgtttgaagcgacagaacaggaaatcgagcaggtcgtatcacagctgagacagacggcgaaagagtcgcatccgctcgttctgaaaatcacaaaatacagctcgttttctcctgtgaataatgtgatatatatgaaagcagagccgacggaggaattaaaatctctgagtgagaaatgctactcaggagcattatccggcgagccggaatacagcttcgttccgcatgtcacggtcggccagaagctgtcgtcagatgaacattccgacgtactcggacagctgaaaatgctggacatttcccacgaagaagtcatcgaccgttttcacttgctctatcagctggataacggctcatggactgtgtatgaaacatttttattaggcggaggagaataactgcttggaatccatcatcgcaaaaactgaaaaacagctaaacgacgcttttttcgtcagaaaagaggtctttgttaaagaacagcacgttccggaagaagaagagattgatcaattcgaagacacgtcagagcatatagtcatatatgacggcggccagccggtcggagccggcagatggcgcttgaaagacgggcatggaaaattagagcgcatctgcgtgatgaaaagccatcgttctttaggcgtcggagccatcattatgcaggcgcttgaaaaagcggcggcagccaaaggcgccgacagctttatcttacatgcgcagacgcaggcggttccgttttacgaaaaacaaggataccgcgtcacatccggcgaagaatttctcgatgcgggcatcccccatctggaaatgataaaggaacacaaacgataaaatcaaaagcactcctgttatatggcaggagtgcttttttatgaaaataaaactatttcatgaattttattgaattttatggaagatcaatgtatgtttagtatacgaagtattacaattcatacaaaaaatacaattcatatttcggagggataaacatgacggcaccaaaaggaaaacacatattcgggactgttaaagtgggcacaaaaggacagattgtcattcctaaagaagcaagagatgttttcgatataaatccgggggattcactgcttatgcttggggatgaccagcaaggtatcgcacttgttaaacaagaactctttttcgagtttgcaaaagatattttaaacgctaagcaaatcgacgcagatagcgaggatgagtaaatgcacgcgattgagctgaagcaattaacgaaacattataaagaaaccgccgccgttgaccgtcttgagttctcagttgagaaaggggaattttttgctttactcggtgagaacggagccggaaaaacgacattaatcagtatgctttgcggactcctttctccggatgacggtgatgcatcagtgcttggacacagtattttgactgatttagataaaataaaaccgaaattgaatatgtccccgcaggaaacagctatcgctcctcatctaaccgtacgggaaaacttagagtttatagccggtgtctacggaattccgaaaaaagaagcaaaaaaaagaacagatgagatgctcgaattgtttcaattaaaagagaaagaaagagcaaaaaccaaaacattatcaggaggaatgcagcgccgcctcagcatcgcaatgggaatgatcaccaagccggatatttatttcttagatgagccgacattagggctggacgtccgttcgcgccgcgagttgtggaaaaatcttgaggcattaaagggtgacatgacgattattttaacgacacactatttagaagaggctgaagccctggcagatcgtatttgcattttagaaaatgggactttaaaagcactgggcacggcggaggatctgaaaaagcaaactcattcagctacatttgaagatgcctttttagcgatttgtgacggggaggcgggtctttatgcttgatttcgccattcgcaaccgcaaagaaatttttcgtgaccccctgtctattatccttggaatcgccctgcctgttattctattgtttctgtttacggcgattgaaaaaaatgcgccgcttgatacctttaaaattcagcatttagcacccggactcattgttttcggttttgctttccttacgatgttctctgcattgctgatcgcaaaagacaaacagaccgcccttttgacccgtttgtttgcttcccctttaaaaacagccgattatgtcatcggttatgcaataccgatgctgccgttagccattttacaaatcgtcatttgttttatcgctgctgctgctgccggtttatccgccgagtggatgaatcttctcgcaggtatcgctgtcttgctgccgattgcgatgatgtccgttttcttcggtttatgtttaggggctgtgtttacggacaaacaaatttcaggtatcggaacgatttatattacactcgtgcaatttctgggcggggcttggatggaggtgagcctgctcggtgacacattcaaacatatcgcttatgccttaccgtttattcactcgatcgagctggcccaggaagtcataaccggagattattcttcctttcatcagcatatttggccgatagcgggatataccgttttggcgcttgcacttgctttcctcagttttatgaaaatcaggaagagataaaaaaagccggcactccgtaatgggagcgccggtcttctttattacgtttctttcagaaggtttattgtatgcggcagcagacgatcatcccccggactgccatggcccggaacgacaatgctgatgtcctgataccttttcatgactttgcggacggcgcgcggccacttatccggataaaagcccggagtaggcacgatttcctttgtttctaaagccttgattaagcaaccgccgaataagagcttatcctcaggcagccagacggtcatattgtcttccgtatgcccttttcccggataaaacgtttcaattttcatatcgccaaactgcagctttgtcacgtttttcaaatctccgagcggccggtcatatccctgctctcgggcgaagtcggcggtcagcttcgtgctgtgcacctttacgccgtatttgtacagggtgttcagcccgccgatacgatcatcatgggcgtgtgtcacaatggcatcggtcatccttttgccgggaaaccgcttttttatttgtgtcattaattgctctgtgagactgtcattccacggagtatcaatcagtacgattcctttggaagtctcaagaagcaatccgttcgcagggacgggacttccgtctgccgtaccggtgcttgtatgcatccaaacatgcggcgccagctgtgtgagagtgacaccttttgctgcggagccctccgcagcgtctgccggtttcattccggcagtaaagaggccgaatagaaataaccccgcaattaataatgaaagctttctcaaattgaatcattcctttccgcatctttcatatatacgactcaaaaaagcccggatatatccgggctttttcacacgtattgatttatcaaccggccttttcccatgatttgcggcagacgggaaagagagcgcttacgtttttcctcatgtactttcttttctgcggctgcggtgttttcctggcggcgctccacctctctgtacaccctgtcattggcaagggcggccgctttcgtaatgccggcataatcagacttataacccgctgcccggtttgcgtattgagaatactgctggttttgaatccgtcctgcataaatcatatgtacccctccccttcgctttcatttcccttaatcttactttttgaaacgctgttcttttgttatgatattctttgtctatcaaatggatgaacaccttttaatgggaggacccctttttgaaatgcgcccgactgaataaccgaacgatacatttacatacatattctagagaacattaccaattcctttttgaagaagctcagaaaggaaatattttttgcgcacattgtgagcagcccgtcttgatgaggctttcgattttagagcagcccgcattttatcaccggcaaaagggagacttcaccgcctgtgaaaaagcatgcgcggccgaggaaccacaagcggagaaagaaaaagaagagtataaggaagccggcatgttccgcctgccgaaaggaaaagcgatttcagagaatccgaaaccgatcgtctcagaatggaaaagcccgaaaaaagtgcctgcggccgaaccgttttcaccaacatccgaggcggctgatacatctttgttccccggcatcggcctgaaccgtgaacagatgaaggcagttactgaaacggacgggcctttattagtgcttgccggagcgggaagcggaaaaacaagggtgctgacagcacgcgccgcccatatgattgaacacctcggcatttcacctgagaatatgctgcttgtgacctttacgacaaaagccgtcgccgaaatgaaagagcggatggcaaatgagtacggtctggcagccggaaaagtctcccgtctcgtgaccggaacattccacagttttttctataaaatactctgtcattatgattcttcaaaatggaacggcagccagcttttaaaaatggagtggcaaaaagagcaatatgtgaaaaaggcgctctatgaagaaaacttggatgaaaaagagtttcccgtcgaccaggcgcttcagcttatcggctgctggaaaaacacgtatctcccccatgagaccattccgcttgcggacgactgggagaaaaaagtgtacaggctctacgaacattacgaacggcagaagcaggaaaaacggcaatttgattttgatgacatggcccaaggctgttatgaactgtttcaaagccggcctgatattctcgcgcagtaccaaaacagattttctcatattttgattgatgaatttcaagatatcaatcctgtccagtacaacattatgcaaatgatcgcaagcccagagaataacctgtgctgcgtgggtgatgacgaccaatccatttatgcgttccgcggcagcagcccgtctttcattttagattttcagaaagattatccggcagcaaagaccatttacttaacggcaaattaccgatcgccgcatccgatcgtctcaagcgctcatgccgtcgtaaagaaaaataaaaaacggtatgaaaaaacactttctgccgtcaaagacggcgttcacaatcccgtgatgttttatccttacgatgaagaagaagaagcgaccatgattgtttcggatatgaaagagaagattcaaaacggggcgagtcctgacgattttgccgtactttaccggacaaacagcgccggacgggccatttatgaaagactgcatcaatcatcgattccttatcatgccgacaggggcgtgcagacgttctacagccgcagaatcgtacgccagatcctcgcctacttatatgcgagtcagaatgaagatgatccggatgcggtgaaagacctgctgcccgccttatttttaaagcaatccgccctgcaaacgttaaaggcgctgtcaattactgaagattgcacgatgattaaggcactgacgaaactgcctgacctgaagccttttcaaatagggaagatcaagcagatcgttccgtttttcgcaagcatccggacaatgaagccgattgaagccatcacctttgcagaaagcaaaatgggtttttccgagtatttaaaaaaacggggcaatgagggaaacaaactggaaaaaggctctgatgatctcagggatgtcaaagtggccgccaaaaaattcaaaaccattcccgattttcttgcgcatgtcgatcatatgcgcgccgctgagaatctgaaaaccgatgaaaacggcgtcgaactgctgaccattcaccgctctaaaggtcttgaattcaatacggtctatattttaggcgcggctgacggctcgatcccccatgacttcgcacttgagacggcgagacagggcgatcccgctccgctcgaagaagaaagacggcttctgtatgtcgcaatgacaagggccatgcagcatttatatgtatcttgtcccgcgtacaggcggggaaaaacagcgcgcagctcaagatttctcgagccccttcttcggacggacagacggagcgcactcaggatataaagaacccggcagatcactgccgggttcttctcacataaaaaggcctttttagcaaggccggctgacgcctatttattgttcagcattttagaaatggtgccaaaatcaagtttctctttaccgcttgtaatagattgaacgattttgtcttccaattctttcggaacacgcttgttagccagctgggacaccttctgaatgacgcctctcaccgtgttttcatctttgaaattggcattttgcaatgatcctgcaaggttcatgacatccttcatgctgacgcctgttttcttctcaatatttttgaaaaattgattatccatggtgtgcctccttttgtggagtaatacgatattgtatgaataaagagcggaacatgtgcccgtaagacaaggaaaaaattccgagtgccccgtctctatactcctttatacatcagggaagcacgggactgaacggtcccgcgcttatccaaggtcttgctaaggtttagccaaaaaaggatgcaccgacaatgatcagaaggatgaacaatacgacaacaagaacaaatgttgagccgtatccgcctccgacatagccgcctccgtatccgccgcagccgccataaccgccgtagccgccgccgaatccgccatatccgaatcccatatttaagcacctcctttactctgtatactctatgtgagccgacttgtttggcttggataaatgcatagggccggtgcggatttcatttcattttattgagaatgctcatttttcttcagttttgcttctgtctcggcggcaaacacatctatccattcctcaaagcgcgatcccgcttcatcaaactcagacagctgtttttcaatagataagatatatttgtcatgctccagctggttttgattgtgccggcggtatttaccgtttatgaatgattcaaatatattcataacatcccctcctcctatgatctatgccgaacagaggccggcgttcggcaaaaaacaaaaaaaccggaagctccggttttttagaaaacggctatttcggttttttcttttggccgcagccgcagccttttttcttaatttttttttcgtaaggctgatgcacagttgatttgtatggagagtgttgggaaggtttgcttgattgattcatggtgatccttcctttccttatgtcatatatgccagtttatgccgaaagtgacggtaagttgctggtggaaccgccttattcctgcagaagacgagaaaccgcagcttcaatgattccggccgcgccggctatggctaacagcaaaatcagccattgcgcagccccgggtatcacaatctgcgccgcaattaaaaaggcggcacaccacacgcccgtacaccagtagcagctgagaagttcaccgataaatgccctgatgccttttccttttatgacaatgtaggtttctgtcgtgccgtctggtgcggtttctgttttttcctcgtgaaaaaggctccgaagcggcgccataatggtgtcaaatacgaaaagcctggccagccggaaaacggcaaacgataacagaataaatgaaagccaattgataaccacctgttcactccttttcaaaacttgacctctttatacatatgcgaaaaccctgatcttcatgaatcgcaccttgtccggtaaaaaaataggtgcggtttagttgtttttcttattccgctcggcgtttcatttgcattatataaagtatgaatgagaaaggagtgaaggttatgtcgtttgaagaaaaagtcgaaacactgcaaccgcaaatatacgaacaattatccaacgaattcgagcagacgatcgaagtgattgattgcgaaaatgtcacaatagatacaacacatataacggccgctctttctatacaagcctcagttactacggcgattatcctcgcgacacagctcgcgatcgcagatgaagacacagccgaccaaatagcaaccgaactgctgatcctggatgattgccaaataaaaaagaggaccgtcattcaagtcctgaacagccgcaatattaaaatcacactgactgcagacgatattatggcctttgtacaaattttgtttcaattattaaatatactttttgctgaactagacatcctttaacctttcttttcaaatatttaaatagaggtgagaacaaatggcagataacgaaaaattaaaaaaagaactcgaaaatctaccagaagtggatccgcttttaaaggtgcttgtcagcaatgtcttcaaaaaacacggcgtgacaaaagataaaatgcgggaaatacctgatgaagaaaaagaaatgctgatcgcattagtcaaagacatgcaggcaaaaacagaagcttttcttgaaagccagaaacagaaaaaagagcaggaaaaagcgcaagatcagcagaccaatccgcaaacccgcagagaacaattaatcgaacagctccggcaaagacgccaaaatcccggtcaataactaaaaaatagtgatttttatcaggatagatgcctgagtcaaagtaaggggccggctcatttaatattagtaaaagaaaaggaggaatagatatggaaagcagaccatactcttgggttgcacttgatcctgaatgcgaacatccgcgagaagaaaaagaagaaaaagaaggcagaagatgcagtgtttgctgtaacggaaacggattcggcgaagataatgccttccttgaccaagaccttgctcaagcgaatctcaacaaacaagtttctgaagaagcgattattatcagagactcttgtgatattaacgtaacgtcaacagacgttcaagcagtcgcttcagtcatgacagcgattaatgcagcagtcgtaacggccactctcacttcaatcgctgacggagtcatcgctgaattggtcgcacaagacttattgcagctaacagctaacaaacaaatcaaccgtcaaaaactgctcatcgaaaactcccgcggcgtaaacgtgacaacagtagatgccgatatcgcagtattgatctcaacagcgacaaatttactgattgctgtcttagtcatcacccttgtcctctaaaaagaaaaagcagagctaaaaatgctctgctttttcttattttctccgcatatgatgaatatatagacgttcacccacaccaagtgaggctcgcgtacatatgttgttaaagacaaaagtcaaataccctaaaagaaggagctgaaatccatgagctgcggaaaacaccatggccgagatgaaagttgtgtatgcgatgcagtcgagaagattttagcagaacaagaggctgttgaagaacaatgcccgactggatgctatacgaatcttttgagcccgacgattgcaggtaaagacaccattccgtttctcgtatttgataaaaaaggcggattgttctccacattcgggaacgtcggaggatttgcggatgacagccagtgctttgagtccattttctttcgtgtagaaagactatgcgattgctgcgcaacgctttcagtattgcgccccgtagatgtgcacggcgacaccctcagcgtctgccatccttgtgatcctgatttcttcggtttagaaaaaacagaattttgcattgaagttgatctgagctgcttcagcgccattcagtgcctttcacccgagcttgttaaccggcctgcgccgcacaaagagaaaaagcatcacggatagtcattgattcgcatctttcctaaagaagaatccccttccaaccttctattacagatgcaatcatcagcccgcccggacttccgggcggctgactctccgctatcgtttaaaccggtaccatttaaaacgtgaagtcaggagggatattatgagcaagcatacaacatactgtgtgcgtgaagcggtagaaaatattgaagacctgcaaaatgcggttgaagaagattgcccgacaggctgttattctaaacttttatctccggcttatacattaggcgatacagtgccgttcgccatcttcacctcaaaatcgaaaccgttcaccgcattcggaaacgtcggcgagctggataacggtccgtgctttaataccgtttttttcagagttgaaagggtctgtgacggctgtgccacattaagcctgcttattgcttttgacgagcataagcacattcttgattttacagataaagactctctctgcgatgtattccgtttagaaaaaacgaactattgcgttgaagtcgatctccatagcttctgcgccatcaattgcctgaacccgagactgatcaaccgcacacattcttaaatcaaaaagcataaaaataagctgccggatgaaagaattcaggcagctttttgtatggttaaaatccaagcggatgcagcgaggtaatatcgtctattgcgagttctgccggcgctccgttgcttgtcgtccgcaggaagatcgcattattttttctgccgacgattacgcctctgtaggtttttccgttggcttctatcagacaaagggtccgcggcatattatgcggcagcttcgttaagaaatcaattttttcaagaatggacattctgctcatcggctttttcacgcgctttggcggaaccttttcctctggggcggcattgtgaaccgcttcaggctctttttcagcggcatcaggctcttttttagcggcgtcgggcttggcagtgtcctgctccgcttgcgccggaacttcttgaacggcttcttctgcgcggctgtgctgttcaggtacttgcttttctggttcgacagccactgctccttcaggctgagtttgacattcttcctcccgctttccatgcatcggctcttcttccggcggctgaggcgctttcctttttttgattaatatgtcctgcattgatgattgcgtgtctgaataatccgcctgaacaatatacatgagcggttttttttccgcgtttctgttttgttttgacatcttcatccctccgattctgtcatgttttatttatatgacggaatgattaaaatcagaagaaagaaaaaagcaatccctgaaagggactgcttgttatttaacgtgcggtaatatggaatcctgaatcaacgtgaagattttcgcccgtgatgcctcttgacaggtcactgaacaagaatgcagccgtgtcgcccacttcttcaggtgttgtcgtgcggcgcagaggcgcgcgctcttcaatttctttcaggatggagttgaaatcactgattccttttgcagacagcgtacggatcggtcctgctgaaatgctgttgacgcggatgttttcttttcctaagtcagcggctaaatatctgacgctcgcatccagagacgcttttgccacacccattacgttatagtttgaaacgacgcgctctccgccgaggtaagtgagtgtaacgatgcttccgccttcagtcataatcggacgcgccgcttttgcgaccgctgtcagagagtaagaactgatgttatgcgcaagcaggaatccttcgcggttcgtatttaaatattcgccgacaagctcttctttgtttgcgaacgcgatgcagtgcgcgatgccgtgaatcacgccgacctgctctttaatgctcgcaaagcaagtttcgatctcagcgtcatttgtcacatcacacggaaggatgatggaatcatttctttctaatgtagccgcaaggtcatgaactgatttttccaagcgctctcccgcgtaagtgaaaatgaggcgcgctccggcttcatgcagcgaacgggcgattccccatgcgatactgcgtttattggcaacgcccatcacaacgatgttgcggccttcaagtgagaaattcatatgtataaagcctcctgtaatcgtcttaaagacatagttttagtacctgatcttaatttttatcatatcataaccttgtccagattgaaagcatgggaaaaagaccgcggatgttgaagcggtctcttttttatctcgtctgcagactgttccttttaaaggcaaaatgattggtcgggccgtgtccctctccaatgccaagcgtatgttccacggcttcccgcacaaaattgacggctgtctcaaacgcggtctgaatggttttcccctttgccgtttccgccgtcagcgcggctgcgaacgtgcaacctgttccgtgggtgtgtttggtgtcaatataagcgtggctgatttgggtaaaagacgaaccgtcaaataataaatcaacgatcctcccctgttcaggctggtgtccgccttttatgatgacatgctttgcaccaagcttgcaaaggcgttcggccgcttttttccggtcctcaaacgtgcggatttccattcccgtcaatacctcagcttccggaacattcggcgtcaccgcatagctgcgcggaattaacagctcttttaacgcggcctgagattcctcacgcagcagggaagcgcctcctttggcaatcatgacggggtcggtgatgacatgatcaagcccgtactgatccgttttttccgcaatttccgcaatcatttccgcgctccacagcattcccgtttttacagcgtcaggccgcaaatcttccgccaccgcgtcaatctggctgcccagcgcttcccgggtgagcggataaatgccgtgaacgcccaaagtgttctgggcggttaccgctgtaatggctgacatcccgaaaacgccgagctcctgaaaggttttgagatccgcctgtataccggcgccgcctcctgaatctgatccggcaatcgtcaatgctttgcatatgctcatgatgtttttctctcctttcgcattatccgatccatttatgataaaaggatttcgctctgctgatatcacttgtgccgtgtattaatgctctgccgtcacgaaacagtaccatcttgaaattgtctttgcaaaacgaaattaaatacgggttggctgaaacatcaagccctgtccgtctgagctgtcccgcaagtttttgcagatcaaactgttcagagatccccgctctgatctgcaccgtgttccgcccgcacagaaccgccgcttttgtctgattttcataggataaaaacggataatcgttcgtgccgcagcttgggcaatcagccgacttaagacgggtgacgtttatttctgaccgttcatttttccataaatcaaaagaacggagaacatgctcgatagatccgcccgttaacagcttcagcgcatctgctgcctgaaaaacggccgtctgcaatacagccgggctgatgattcccgccgtatcgcatgtcataccgcctaaaggcaatgtctcaagcagacagtgaaggcacggcgtgacaccgggaatgacggtaaaagagagcccgtagctgccgacacaggcgccgtacagaaagggaatccctttctgtacagccgcatcattcacaatcagcctcgtttcaaagttgtcggcggcatccacgatgagggaggcgtcacgaatcaatccgggtgcgttttccgcagtgacatccatgacaaatccctcgacctctacatcactatttatggatcgaagccgtttttcagccgccgcggctttcggcatttcctctctgacatcgtcttcggtatagagctgctggcgctggagattactccactccacataatctctgtcagcgatcgttaccttcccgacccctgctctgacaagcatctccgcacttgccgtcccaagcgcacccgcgccgataatcacggcatgagacgaccggagcttctcttggccggagggaccgatcggctgaaacagctcctgtctggaatatctgtccgtcataccggaagaccgtctcgcggactgcttgcagttccgtaatctttcaccggaattctccccgcttcataagaaaggcggcccgcttctacggcaagcttcatcgcccgggccatcttgaccggatcatcagcgcctgacacagcggtatttaacagcacaccgtcagccccgagctccatcgcgtaggcggcgtcttttgaagatccgacgccggcatcgacaatgaccggcaccttcgcctgttcaatgataaaggatagattcagcggatttaaaattccctgaccggaaccgatcggcgaagcacccggcataatagcatgcaccccgagctcctcaagacgtcttgcgagcacgacatcatctgacgtatacggaagcacgataaacccctctttgagcagctgttctgatgctttcagcgtttcaaccggatctggcaaaagtgaccggctgcatccgatgacttctacttttatcatgtcacaaagccctgaagctttggcaagccttgcgattcggactgcctcttcagccgttgcggcgccggccgtattcggcagaagcgtgtatttagacaaatcaagctgttcgagaaagttaggctgagactcttcaaagatgttcatccgccttaccgcaaaggttaaaatatctgattccgagacggccaccgcctctttctgaatctcaaaactcggatattttcccgttcctaacagcaatcttgactgaaactgttttccgcctattgttaacatcctcatccgcctcctacaaaatggacaatttctatgacatcgcggtcacacaaactcgtattttcataattctttttttcaatgatttctttatttctctccacaactacgattctttgatcaagctggtacgattcaagcaaatcctgaaccgtcccctcttttcgattccaatcaatttgttttccgttcagctgaaggatcatatatgaacagcctccttgcgatcgattcgaaacgcttcttcccattcctgtttaatctgtctttccatgatcataccccgcaccatttcagccgttgccggcgccaacaggatgccgttccgaaaatggccggcggcgaagatgatgccgctgtcttcaggatgccgcccgataaacggctttccgtctcttgttcccggcctgagccccgcccaaaaccggtctattttcatatgttcgacggcgggaagcatggttttcgcttttgcaatgacggcctcaattcctccgatgtcaggcgtatcgctccagtcgccgtgtttcatcgtggcgccgatgacaagccggccgctttttctcgggacgacataacaatgatcatggtaaagggttttggtcagcgggatatcgtcattccacacggaaaggcattctccttttacaggaaaaaaaggctgtcccaagccgagctggctgaaaaaccggccgctccatacaccgcttgcaactgcgactttgtcagcatagacatccccgccggacgttgcgatgcaatattctccgttcactcgttttacggaggtgacttgtgtatgctcatatatgtcagcgccatagcgccgcgccccttttgcatacgctttgcaaacatagtacggttcgacatggacatcgtcttttataaaacttgcgcctagaatgtcttttgaagcgtaaggctctttttcaagggcatcttccgctgaaagccaggtgacggaaggtagatcatccatcttccgcagacgggcgatatcttcttcggtatacgccagtttaagcattccgccgttatggcgcctgatgtcaatgccgcaagcttcctcaagctcttgccccgccgcttcatacagcctttgactgtgcatggcaaaatcaaaaaacgcatcccggttttcacattccgcatgagcgcccagcattcccgcggcagcgcttgtcgtttttcggccgacttctccggcttcaaacaagacaacgttttgctgcgtcttcgccagctcataagaaatggcgcacccgataattccgccgccgatcaccgccgtatcatagtgcttcttcataatcggcctcccttaccgcgcgtgcataccgttttgccgcctcctcaggattttcagctgagaaaatgcctgacatgacggcaattccgtccggcttcgcctgctttgtgtgtccgatcgtctgcagtgtcattccgccgattgcgataacggggatggaaagcgtgcgtttgatctctgaaagcaggctgatgcctcttgcttcaagtccttgtttacattcggtttcaaatacatggccgaacaccacataatccgcatcttccttttcagcttggatggcttctttcagcgaatgaaccgaacgtccgatatgaagatggggaaatctgcttcgcacctgctttacggaaaagctgcgggacggaagctgaacacggtgtatattggcaaaaagcgcgatatccgccctgtcattgatgatcaatttgtccttatccgcaccgccctttttcaaaagggacaaaagctgcatgatctctcccgctgttttatcccgctcacggatatggataaagcttacttcgcgctgaatcgaaagaatatcctcagccagctcggcaacgggtttgcgattatcagttaccgcgtgcagctccaaaggattccacctcttttccgcccttctcggaccagccttctttttgataagccattccccaaaattgatattcataatagcttgaaatcacaaaattctctttcattttcgcgcggatttcctctgtgctgttttcagcaatctcgtcaaaacggctgatctgttcttcgacttgctgtctgaaccagtctccgccgtatgtaccgatccatttttcataaatcggatgctccggtttgcactcctttaagtgttcgccgacttcataataaagccaataacagggcagaagcgcagctaatatttctccaaaattgccgctcatcaccgatctgtacatatgagacgtataagaataggcggtcggtgccggtttaaatgccgcacgctcttcttccgtaatccctaaaagctccgtaaactcgcggtgcagcgccatttccgcttcatatgtcccttgagcgtggcccgccatcctgcccgtcgtaaacaagtcttcggcatatgcggcgccgaacgcctgaacttttgcaaaatgcgtcaaatagtaggaatcttgcagcacgtaatagctgaaacggtctatcggcaggcttccgtcaccgattcccgttacaaacggatgaacaaaacttccgtcccaccattcggcagccgccagtctgcattcttcagaaaatgtcatcatgtcttcccccctgataaaataaaaaaaccactttcccgcatcggaaaagtggtttggaatttaaatggataaaaggaacccccaaaaaataccgctccacttccctacgcaggtctgaacctgttcaagttatgagggtctaaaagtctcacttttatctcagcccttatgaaggacacccctagtggtcatacgattaatgatttatttgttatgccttctatattatcacgaattgcaatttggtcaagcttcaaggatttttctcagttccgacacgtagttgcgcgagcccgtgacgatgagacggtctcctgttttcagcctcgtgtctccgtgcggaacgatgctgtccacacctctgaaaatccggacgaaaatgacatcgcccatcagcggaaattcccgcagaatgatgccgttatacgccgggttttccagattgatctgatataacgaagactcctcattcgtcaggaggctcatcacgcccggcgcctcaattaatgcgcgcaagagcgtctttgtagacagaaggatagaaaaaatactgatgccctcttctttcagttttgtttcatgctcaaccgagccgacgcttgcgatgatacgctcagtccctttctctttcgctattaaggcgatttcggcgttcacatcttcatttcccgtcgccacgacaagaatatccgttttgaaaataccgtgcgactcaagcgtgcctggctcgtaatcagaaatcgtgtcaaccgaaaaaacggattccgcaagcgtttccccggcattttcctgatacacatggacgacccgtacttcatattcctcatcgggcaattccagcgtaaccggaagtgtcatttggttggcgccgataaatgtaatgcgctttttttcctgcggcgcactttgccgtttgtataatttcttaaagccgatcggcgtgatgatgctggcaataaccgcaactaaagtcagcgcgccggacatattggcgctgataatgtggagcctttctccgatcgtagccgccgcgataacaagagacagcgtggacgtcagcaaaaagcccgaagcaaacacggttcttttgtcataccatttctttaaataaaacaccggaaacattttgctgataaacagcgcaagcagaagcagcggaatcatcgttaatgttttcggatcttggaaaagcgtccaaatgtccaatttcaccccgaccatgacgaaaaagatcggaattaaaaacccgtagccgaaggaatccagctgttccaccatttctttattcggagacagaagcgataccagaacgcctgccaaaaacgcgccgagaatattttccgccccgagagattccgataaagcgacaagcacgataatcagtgtgaaaatggctctcgtgccgatctgcacggtgcctttagacatcgactgcacaaatgaacggtgtttaaagatcctgccgaagaaatacagcacgacccccgcggcaaagagaatcaacagaagccacatatttccgctgtcttctccgtaaagagaagagaagaaagcgagcagaatcatcgtagccaagtccgcgataacggcgacaagcaggatgatctggccgatattggagttcataatccgttcttcctttaaagtcgggaccaccacaccgagtgatatcgtcgaaataataagcgtcattaaaaatgcgttttgaataaaaccggctaatacaaaggcataggacagcagcaatgataaaataaagatgccgaaaaagataatcagtgcggcagaaaacgtgttgggcgcttccttgccattcggaaggaattgttttttcttccctttctcaaatgaagaaaaatcaatttccaagccgcttaaaaacattaaaaagataaagccgagaacagacagcgtctccagccacgtgtctccctgaacgacaagattcaggccgctttttccgataataagccccatgatgatctccgcgacgacgacggggatgctgagcttaaaccgatgtaaaaggagcggcgtcaaaaaagcgacgatcagaacgacgactaaagatgcgactgatgtgtgttccattcgtaaatacctccttaaaacaagggttataaaagcccgcttaaagcgggcgaaaccttacttttttttaaaaacataacgcatattctaacaaggctgaacgcgaaaaaaaagtgataaggctttatttctttaattctttttttaatttgtgcaaaaacagcgtaattaggtataggaattagccccataataaataaaaaaacgttaataaggaggcagacacgaatggcttatgacatcatcagcgatatacacggatgttatgacgaaatgatcgcgttaatgcaaaagctcggatatgaagtcaaagacggaacgcccgttcactctgaaggcaggacgcttgtctttgcgggggatttaacggacagaggcccaaaatccgtagaagtgatgcgttttgtggcaaaagcatatgaaaaaggagccgtccgttatgtcccgggaaatcattgcaacaaactgtaccgttacttaaaaggaaaccccgtaaaagtgatgcacggactggaaacgacggcagccgaactgaaagagctgtctccagccgacagaacggaagtctccagacaattcatccgcttatatgagtcagcgccgctttatgacattttacataatggcgatctcgttgtcgcccacgccggcataaaagctgacgatatcggtaaatactcgcgtaaggtaaaagaatttgttctgtacggcgatatcacaggtgaaacgtatcccgacggcagacccgtcagaagagactgggccgccgcttatgaaggcaaggcatggattgtttacggccataccccggtaaaacgcccacggatcgtcaaccgtacaatcaacattgatacaggatgcgtcttcggcaatcaactgacaggctttcgctttccggagcatgaaaccgtctctgtggaaagctcaatgccctatgatgcctcacgatttcgcgaggatcacggaaggcaggcatgaaaaaaagcccgaaaccggcaaacggttcgggctttacatgtgttcaattaatgttttcatatcgtcaggcaccggagcgtgaaaaacgagcgtttttccggtcatggggtgtacgaatgaaagccgctcactgtgaagagcctgccgggcaattccctcattttttccgccgtacagtgtatcaccgactaacgggtggccgaggtagctcatatgcacccggatttgatgcgtccgccccgtttccagccgcagggctgcaagcgtaaacgcatgtcccgctttttccgtttgaaaatgcgtcaccgctcgttgtccctccggcgttaccatccgctcaataatactgtcgtgttttcttccgatgggcgcgtccaccgttccttccttctgcagcatgatcccgtgtacgacagcgagataccgcctgctgacaagcccctttttctgcgctgccgacaaaagagaatgggaaagccgatgtttggcgatcagcatcgcccccgatgtatccctgtcaaggcgggtgacaagatgaaccgttgattgtacgccgctttttcggtagtggctgatcactccgttagcgatgctttccgacgggtgttctcttgatggaattgaggagacatacggctgtttattgaccacaagcacatggtcatcttcataaagaatatcaagaggaaccggctcaggcaaaagcgtttcactcacatgctccttcggaaattcaatcttaagcacgtctccttccgctaacacggcgcggacggttacatgctctccgttcacaagcaggtctcccccgccgaatttaatgtcagcgagaagccgctttgaaatgccgagctgcgccgtatattcttttaccgtcatgccggcttcccgggcagtcatgttcttttggataaaaaagttgtccaatccgtttcctctttctattcgccttttccgataaaggagtcctgcacccttttccaaaacggaaaaggacggaatcttgcaaatctgactttttcatttgccacacggcatagaatggacttgacatccttatgcagcaaggttaaatgatcaattgtgacttgaaagtcgacgtcgtttctcggtttgatgacacagttatgatgatcgggaagcaaaagcggcgagccgacagtcctgaacactctgttgttgatggatgccatttccgcaagctgaatcgctctgatggaagggtggatgatcgcgccgcctaacgccttattataagccgtgcttccggaaggcgtggacagacataaaccgtctcccctgaacgtttcaaacagctggcctttaatttccacgtcagcgacgagactgccttctatgcttttgatcgtacattcgttcaaagccagataccgctcctcacgctcttcatcatgataagtgacaatcacctcaagaaggggatactccacggtatgatacggcgttttggcgatggccagaacgagcttttctatctcctgcggaacccaatcggcataaaaacccaaatgccccgtgtgaactccgacaaacgccgttttatcgagacggtcgctgtacctgtgaaatgcgtaaagaagcgttccgtcaccgccgacggaaatcacgatttccggctctttttcatccaaggtcatatcaaaatcgagtaaatacgcctgtattttgcttttcaatgtatctgaaacctcgtctccttttgaagaaacggcaaatttcatgccattcccctcctttcctactggtggtctcccgcttttttctttcgcgagaacgcggcttgggcttcctggatttctccgcggatttctgacatttcttcatcgagccgggatgcggcttctgaggcccgctgcagcctcagctttactttttcgggaatgttcccgctgtatttgtaattcagtgaatgctcaatggttgcccaaaagttcatggcaagcgtccgaatctgtatttccacaagaacgtgcttttcaccggacgttgtttgtaaaggatataaaacgacaaggtggtaagaccgatatccgctttccttatgctctgctatgtaatcccgcttatcgacaacggtaaaatcttttctggcaaacagcatatttttgacgatctggatatcatcgacaaattggcacatgatacgcagccccgcgatatcctgcatcgtttcaatctgatgaagcggtatgctttttcgtctcgctttttcaagaatgctcgccaccggcttcacgcggcctgtcacaaactcaatcggtgagtggtcatcttcatactcataaagggttctgacgcctttcagcttcacctttaattcttcaacagcctggcggtatggcgctagaaattgctcccattgtttgtcatccatcgtacatcccccaattccgaacctgttctaaagaaatacgtttttcactttttcttccatatctccgtagtttgcattatctttaatattttcaagaagataatcgagttcttcatgcagccctgaaagttcaaccgtttttccgccggcctcaaggaccgccggttttctttggtctaaggcttctttcagatccggccagacatgttcttttataatgacatattcaaaagagtcagctgattcaagtatgtatacaaaagcaaagtgatcggaatcaacaagcatttgacctgaggctttgcgttccgctccgcttaagtcctctccgcacttcaagcggagcgcgtcttctgttaatgatgcattttggatttcaattctcttttgcataatgttctccttttttaacaaagtacagcatttattttatcatatcaaggtcgatattgataaacgtaacctctaaagagataatgggaattatacaatttttcgtcctgaaaggaagactgtcatgacccaagaaatagaaattgaattcaaaaacctgctgacaaaatcagaatttctgaagctgagtgaagcactctgcatgaaagaacatgattttaaacagcaggtcaatcattatttcgacacgaaagatttttccctgaaacaaaaaaaatcagcactccgcatccgagaaaaagacggcgcgttcgttctgacgttaaaagagcctgccgcggtcggtctgctggaaacccaccaagagcttgcggcatttgatcttgacgtcttcaagattccggaaggccccgtcaaacgtcagctggaaggtctcggaatcaactcagaacacatttgctatttcgggacgctgtcgaccgcacgcgcggaaaaagaatcagaaaaaggcttaatcattttagatcacagccgatatttagagaaagaagactttgaattggaattcgaagctgctgactgggatgaaggaaaacgggcgtttgaacaattgctcaagcaattcggcatcccagagcggatcacgaaaaataaaatccagcgtttttatgaacagaaacaaaaaaaggtggaatgacacagtgaatatcacgaattgggcggcccttctccagctgcaatcaatggcgctgcaatcaatctctcatacaagcacggcttcaggcggacaatcttcagaaagcccgcttgcaaatttcagcgcgcttctcagccagtatacggacacagccgtccggcagcagccggaatcaggaattttaaacggtgtgcggaccgctcacgcttcatattcaccgagaattcccgtttcatccggctccgcggctgcttcacagaccgcttccccgggcataaagtctccggatgcggcttctgatatcagcaccggaaacttttcaatagacagcgccattcagaaagcggccgaaaaatacggagtggacgaaaagctgatccgcgcggttattaaacaggaatcaggctttaatccgaaagcggtcagcggtgcgggggcaatgggactgatgcagctcatgccttccacggcagaatcactcggggtgtcaaacccgcttgatcccgtccagaacgctgagggcggcacaaagtacttaaagcagatgctcacgaaatacgacggaaatgtatctttggcgttagccgcctacaacgcaggccccggcaacgtagatcggtacggaggcattccgccgtttaaggaaacacagcaatatgtcaaaaacataaccaaacagtattacgcgtaaaccagagaggcttccttcgccctctggtttttttgcggagtgaaatcttacacatgaatgaaggcgatgtgatatgatatgaaatacaagcgcctgacagaaaggcactttgtttgtagaaataaaatgttattgctaaaatatacagtaactgaagatagtaaaactgaaagataaattcgcaatgggaattatgattcctattagccatataaaggagtagtcaacatgggacaatcgtttaacgcaccatatgaagcgattggagaggaacttctatcgcaacttgttgatactttttatgagcgtgtctcgtctcatcccttgctgaagccgatatttccaagtgatttgactgaaacggccagaaaacaaaagcaatttttaacccagtatttgggcggacctcctctttatactgaagagcacggacatcccatgctcagggcaaggcatctcccctttccgattacggacgagagggctgatgcgtggctaagctgtatgagcaaagcgatggatcaggtcgggctggagggcgatattcgtgaatttctgtacgggcgtctggaactgacggccaggcatatggtaaaccagtcagaagcggaggatcgatcatattgacgaattatcagcatgagcaatacttcgcccattgccacggacatccaaaaaaaccgctcgaaatttacatgtttgtcgaccctttatgtcctgaatgctggtcgctggagcccgtcataaaaaaattaaaaatcaaatacggacgtttttttacgctgcggatcattgtttccgcgagtattacatcgctgaataagcaaaagcggaaaaaacaccttcttgccgaagcttgggaaaaaattgcgaaccgttccgggatgccctgtgacggaagcctttggcttgagcaggatcagcctctttcatcgccctaccttgccgcacttgctttaaaagcggccgaactgcagggaagaaaagcgggcattctgtttctccgcagcatgcaggaaagcctgtttgtttccaagcagaatattacggatgaagacgttcttttagagattgccgaaaagacgaaattggatgttgaagaattcaagcgcgacctccattcgcaaagcgcggtaaaagcgcttcagtgcgatatgaaaatcgcggcggaaatggacgtcaccgtcaacccgacattgacgttctttaacagcctgcatgatgatgaagggctgaaggttcccggcaactattcttatgacgtatacgaagagatcttattcgaaatgctcggggatgaaccgaagccttctgaaacgccgcctttggaatgtttcattgaatatttccggtttgtcgcatcgaaagaaatcgcactcgtttatgatttgagtctagaagaagttgaaaaagaaatgaaaaaactggcattcgccaaaaaggtcgccagagtggaagcaaagcacggtctgttttggaagtctctggccggcacccaggaggatgtcacctgttgtgatcattaaaaaaagctgattccttacggagccggctttttttgtgcaaataaagaaaccgcgccgggataagcgcggtttcatatgtcttaacgacaacaaaggggatgggagaaatttttcacggtcaaacaaaggggtaatgtttgtttgtgatcaatttcacatccttatcatatcaaatcttgtcgagttttgacaagccataagattaatgttcatatttttgtcacaaaacataactgactgcttgttttcatagaatatatcaatcataaacaaggagggaaatcaatgctccgcaccgtattgatcatcggaatgattgtgtttttcttctttttaaacctgctggccatgatgcacatgctgccgatttacattacatctcccctgctgtttctgtccatattatttgccctgtatcggctgaatcacagaaaaacgtttaaagggttttaaaaaaagcctgcgcatcttatgcacaggcttttttgaactacgaagggttcactttcgaaagaagctcttccatctcgttcagtttctcttcaaacattttgcaggccgcctcgatcggttcaggcgatgtcatatcgactcccgcttttttcagtatgtcgatcggatattccgagcttcccgcttttaagaattcggtatagcgctccaccgcaggcttgccttcttttaagatctggctgctcagcgcttgggccgcactgtagcctgtcgcatattgatacacataataattgtaatagaaatgcggaattcttgaccattccagactgatttctttatcaatcaccatgttgtcaccgaaatactttttattcagatcataataaagttcgttcagcagttcaggcgttagcggctcgccttcctgtgctttcgtatgaatcagatgctcaaattcagcgaacatcgtctgtctgaacactgtgcctctgaatccttcaagcatatggttgagcaggtacagacgctgtttttcatcctttaagctgttcagcatatattcaccgagcagcgcttcattagtcgttgaagcaacttcagcgacaaaaatgctgtagttaccgtacggatacggctgatattttctcgtatagtaactgtgcacggaatggccgaactcgtgaacgagcgtaaacagattattgacattgtcatgccagttcatcaagatgtacggattcgtgccgtatgtaccggacgaataagcaccgctgcgttttcctttattttcgtatatatcgacccagcggttttcaagtccttcttttaaaatagacgcgtattcctcgcccagcggagcaagtcctttgagcatataatctttcgcttcctcatatgtgaccttcattcccgaatcttttacgagcggtgtgtaaaggtcataaatatggacttcatcaaggccgagaacctttttccgcaggtcaatgtaacggtgtaataacggaagatgtttattgatcgttttaataaggttatcgtaaacttcttcagggatgctgttattggataaagccgcttcccgtgctgatttatattttttcacacgggcgtaaaaattatcttttttcacagtgccgctgagtgtagtcgccatcgtgtttttatactgtccgtatgttttatatacggcttcaaatgcgtttttgcggacttcacgattgctgctttccaggaaattaataaagttgccgtgtgtgatttgagtttccttgccgttttcatctttaattgacggaaacgtaatatcggcgttatttaaaacactgaatgtattggaaggcgacgacagcgcttctgaggcttccgcaagcagggcctcttcttgttcgctcagcacgtgcggacgctgttttgtaatttcttcaattgcatgggagtaaagtttaagctcctctttttccagaataaactggtgcagcttgtcctcctgaatcgccagaatttccggttcaatgtaagcagtcgcgctggcagcctgggaatacaggcttgcggctttgtcgttcagcccttggtagaaagaatttcccgtatcctggtctgagcgcatatgcgcgtatgcataaagtttcccaaggcggttcgtcacttcatcctgtgccgtaagcgccgcgtataaattatcagccgaatgagcaagcgtgcctttaaaagaagataaattcgggattaattctttaactgcttgaaattctttattccaggcctcatcactaggaaaaatatcctctagtctccatgtatgctctgcctttacttcacttctgtcaggcagctgtgctgctttattttcctcagtcatggtgatccccctcgttttctttacttcaagccaattgaaaaaacgattgtttctccaaaaacttgtgttgtgattatcttccggcttttcactgccttttgtcaaatcatatgcggcatataagaccgagcataccaataatacagtgaaaaaacgaaaacaaactgcttgtacgcccctcacattcgccaccaccttgacgttagggtgaacgaaatgaagcattctcattccccaaaaaagagcagatcccgccggcgcagctcttctgccgtttgagggagcttccgttgagatgagggcatatatacttcattctcaatttcccttaaaaaatcctgcaagcataagaaatcagcatattgttttaccgccattctgataaggctatcttgtgaaccataccgcatccgaatctccttacgcctgattttttgccgcaaatcatgaaccatgccggataatcggatcggcgtgccttttttagaaagttccgcaagccgcaagtataaatggctctgccacacaaaaacgggactggcaaacacaaagcccgctgaaacgggaataaacacttcagatgggagaaatggaaatgcaacctgatgtctttcgtaaaaaagacgccggataagaccggcatcttcagataaaaaccggccgcttttgtttcggaagccggctacggcacgtccccacgagggaagtctgacgctgtgcctcccttccggatgacaaatgtctttcaggtttgctttgtgaagagggattgtaattaagccggcataagaatagccggtgtaaaacggagtgatggaatgcagcctgtaaaaggagcgggcgtcggggcagtaaaacagtaaggaggaaaatgaatggacttcaaagaactgccagtgaaaagcagaaagccggaaaaattgcgcggccatccgttttaaccgttttgccccgatgatccagaccggccggtacccggcgtttttcaggcctgccgtccggctctttaaagagtccgccgaaaggttcgcacattgaaattcaaaagccagcttctcttctccgctttccgcggtcaagtcaggccgctgtccagcggaagtcagatacggttccaggctgacgctgcacccttgtgtctttagccagagaaaaagctgtctttttccttccagatggtattcgctttcaggttcggattcccccggacacagcctgctttttttatgagcgaagtgcggcagtttctcccgtcccagtttgatatcaagttcactttcgcaaacggggcagaaccagcgtttctttctcagctccgccgctttttcctttgaatagcttccggccagctgaatgagccgtccgtcggcagtcacagcactgaacatgttgcatcttctcctttcctgaatcttgttgtattcagcaggaagaagatataatcctgtttgcggatgagagccgttatgcggttttcagccgttcatcctgtcattcagaacaaaaaaaaccgatttctgctgagagaaatcggtttgttatgatgcaaagtgtttttttattgtatataacgcatgatcagcgatcaccaatttgccgtattcttcaagacggtgaatgctgactgatgattcgtgcgcgtactccaacaggatgcttagctgattttcaacctcttcatcagtttgctcataaaaatctgcatataaataatatcggtcttcaaacgaatacagggtcgttttgattccgttaagattcaattttgatagcgagatgagatcctcaaaatcatcgaaccgcaaagtgaactgaagcttttgctccttatcttcccggctctcggcctgctcttctttctggaaatcatcaagtaaagcatcgagattttcatctgccggctcttgttttttatcttccgggatcggcagttcgagtttttgtccgtccttggaaagctgggcttttgttacgattatttccagtcctttgtccaatgcctgaacctgaatccaaagaggaccctcgacagcgaattcctcttcatcatgcacttcatccatgacttcccagaacagttcttcactgcgctcgcgattgtaccagatttcttctctgtcaaaaccgcgatcttcaatatcaccataagacatataaaattttacagtatgctcattaattctttctatttccattttgccaaccttcccttctttataagatgttgaagggacatctaagctcccgatgaatagtactttactacactttacccattccgtccacatcttaaccttatagaagacagcgcaaattctttatatttctattttatgataaaacaggtataaaagaaataaaaaagcattttcacaccgaaaaacaggctttctcccggttcccatcataaatagcgcaccgcttcatatattagctgtacaagcaatcgatctataagcgaggtgttaccatgccgcacgattacctgctgtcccttctgctcattatcggaattgaccttattctcggcggtgacaatgccgtcgtcatcgcgatggccagccggaatctggcccataaacaaagacagcaagcgatcatcttcggaacgtttatcgcagtcgtcttgagaatcgttctgacgagcgctgcggtctatttattgaatgttccttttttacaatgcgcaggcggggtatttttattgtatctcggctatcagcttctgattgagaagaaagatgcgcagcatgtgaaaagcagttcttctctttggaaagccatccgcacaatcgttatggctgatatctttatgtcgcttgacaatgtcatcgcagtagccggcgcttctcacggtgagctgacacttgtagtgatcggtctcttcatctcggtgccgattatcatttggggcagcaagctcgttcatgccgccatggacaaaatgcctttattgatgtacgccgggagcggtcttctcgcatttaccggcggtgaaatgattgccggagacagcaagctgtcatttttcatggcagaacacggcattatacaaatgacgctgccgattttgaccgtcgtatttgttatcctcgccagtatgatttaccagcagactgaaaaataacaaaaagcccaaaccgcgatggttttgggctttttccatgcttatcgtaagcttatatcagttggcaagacgctgtgcttctcttaattggaaagaacgcacttttcttggcaggaatcgtctgatttcatcttcgttatagccgacttgcagacgtttttcatcaatgatgatcggacggcggagcagtcccggatgctcattgatcaaagtatataagtcttgaagcggcatagattcaacatttacgttcagtttctggaatactttagaacgggtagagataatttcatccgtaccgtcttcagtcatacgcagaatctgcttgatctcatcaattgataacggctcggagaaaatgtttctctctacaaacggaatctcgtgctcttcaagccaagctcttgcttttctgcatgacgtacagctaggtgatgtgtataatgtaaccattaatcttcactcctctaattagtaggatgaacatgtttgtattctcaaattgaaatgactttaaaaaaggaatctttataggtattatactataaaaaagtaagtgtgaacagtctcctgagaaaaaaatgtgtcaatccggcaaatttacggctggcggatgtttccccattctcaattagctcagctgatcgaaaatgttttttcgttttttctcatcaatgactttgagaacttcatccgttttttcgtatgattctccgtaccatttttcatctttataagtgtgaatgttttcatatgtctgtttcatcgcttcaaacatttcttcttctgattccgtcttaggtgaccagtacagaatctccattttgttcacttcattcgtagccaatgaccggcgccgatacccgattgactgcgcgtgcttgaaatgctctctttgataaaaacgcaagcgtttctgtgtatccgtgtcatcctcgtcaacaggctccacctcaagcagaatcggcttgtttttctttttcagcctgccgatcagcttgcttccgaggccttgtcctctggatttctttgacacaaacaggtaatcaataaagatgaaagagtcaaattccgcatacatcagcacgtggtactgcccctcttctttatgataaacatcgctttgctcctttaacagagcttccatatgcgcttttgatttcatttcttcaatcggaaaatattcactcagcttttcgtaccagttcattcatttgctccttatgggttcgttgtcttcacacttttagatataccccatttccgattgtttaaacaatcttacatctattaagacgtgtgatcctttaacatggtttcaatttttttaaaatggtgtgtaatcgacgtttttggtatagcggtttgccgcgtcccacaataaaaattcgtcaattccttcatcatgcagcgctttaacctggtcttccacctggcgttttccgtacttttgataatttccgctgccgagatatgatgccgtgaagtcctgaagccacggacgcgatacaggctggtgtttcagcttagacagttttttattttccacctttgcgtattctttgacgactttgtaaggctcaagatccggtttatcaatgccgaaatagcttgtccaatggctcgggtaaatcatggatgaaatgacatcgacctgttctgaaattttgctgaaattctggccgatcccaggcgcttccggcagcgtggctgaatagccgaaaatatcaaccgacacatccgcggcgtacggcttgagttttttcttcgcataaccgacaaaatcggtgacggcgtgaacgcgtttttgcacattgctgtctgctgtttttccgtaatcgccgtgtccgtatgtcagttcgtcatcacgtttttcaaatccttcaggaaaacggacataatcaaactgaatttcttgaaaacccatctttacggcttgttttgcaatctttacattgtaatcccatacttctttcataaacggattgacgaacgattcgccgcggccgtttttccagacacttccgtttttttctttaaaagaccactccggctttttgttcgcgagttcgctgtctttaaatacgacaatacgcgcgatcggatagatctttttttcctccagctttttcatcatcttttttgggtctttgatgtacggcttggcgattttggcatactcagaatggccgtccggcttaaaggtgaggtttccgttgtcatccttgacatcaatcaccattgtattgagctccgttttgtccacaaagtctgtcagctccccgaatttgcttcctcccgctgaatgccctgtgacgtaaatgccccgcaccttatcaggatgtgaaaaatgcagccctgacggataagcgaaccgtgcatttgatttcggcagttctttttcggccagcgctatttttacaagcggctgctcctctttcgcagcggcgtgggccggataagcggctgcactgataaacagtcccgcacaaatggcgcacaaaatggttttcatactgatctccccctttttttccattatagaaaaacgggagcaggcttaataaacttgaatgtgcgcaaaaaaatcctccaagactgagtcttggaggatgatacgtttatagataggttttaaattcagcttctgtgcacatgacaaaatgtcccggtttcacttctctgaattccattttttctccgtcttgcagctgatgaactgccggatcgtatttctttcgcgtgcgatttctttcatagtccggatcagggagcgggatagcggacagcaatgatttcgtgtatgggtgaagcgggttttcgtaaagctcatccgccggcgcaagctccaccaattttccgaaatacatgacgccgatgcggtcgctgatgtatttgaccattgataaatcatgggcgataaacaggtaagtgagccctttttctttctgcaattctttcattaaattgacgacttgcgcctgaatggagacatcaagcgccgaaatcggttcgtccgcgatgataaactccggatcaaccgccagcgctctggcgattccgatacgctggcgctgtccgcccgaaaattcatgcgggtagcggttggcgtgctctttatttaaaccgaccgtttccagcagttcgtgaacccgctgcatccgctcttttttcgtttttgccaggcggtgaatatctattccctcggcaataatgtcggcgactgtcattctcggatttaaagatgcgtacggatcctggaaaatcatctgcattttccggttaaactccagcagcttcttgcgggattttttcccgtgcacattttccccgttaaagagaacttccccgccggttgcctcatacagccggataatgctgcggcccgtcgttgatttaccgcagcccgattctccgacaaggccgagcgtttcgcctttataaatatcaaatgacaaatcatctacggcttttaccgttcctttctgcgtgaaaaaatgctgttttaagtgtttaatttcgagaagtttctcagtcatttttttcaccttccttcattaaaacaggatgctgatacgtattcggaagctgacggattttagccttcaccgcttcaggcggctcgaccttaggcgcatcaggatgcagaagccacgatttcacgaaatgcgtatcagacactttatacatcggcggttcctgttcaaagtcaattttcatcgcatatgagctgcggagcgcaaatgcatcccctttcggagggttcgtcagatcaggcggcgtgcccgggatggccgtcagtttttcctgatcggtgctgtccaggctaggcattgaggcaagcagtccccacgtatatggatggcgcggatcataaaagatttcatccaccgtgcccgattcgacgacctgacccgcgtacatgacagcgacccggtcggcgacattggcgacaacgccgagatcatgcgtgataaaaatgatagacgtatcaattttcttttgcagatctttcatcagctcaaggatctgtgcctgaatcgtcacatcaagagctgttgtcggttcatcggcaattaacagtttcggatttgccgcaagcgccatcgcgatgacgacacgctgtctcatcccgcctgaaaattcatgggggaattggccgatccgtttttcgggcatcggaattccgacgagatcaagcagctctatggcgcgctttttcgccgcttcacttgagattttttcatgtttgaaaagcacttccgtaatttgtttgccgactctcatcgtcgggttcagagaggtcatcggatcttggaaaatcattccgatatcctttcctctgatggcctgcatttctttttcagacatcggcacgatatcgcgtccgtcaaaaagaatctgtcctcttttaaagtagcccggcggcatcgggatcagcttcataatcgcttgggaggtcacactttttccggaacccgactctcccacgatcgccagcgtctctcctttattcaaatggaaattcacgccgcggattgcctgtacctctccgccgtatgttttaaatgaaatggctaagtcttttacttctagcaaacgtgtcactcatatcactccttatttgcgtaacttaggatccagcgcgtctcttaacccgtcgccgacaacgttaaagccgaacatcgccaggcagataaagccggcagggaagaacagacgccaagggtaataggttaatgcaggcaatccgtctgaggccatcgttccccagctcgcaagcggcgcaggtacgccaaggcccaaataacttaaaaacgcttctgtaaaaatcgccgtcggaaccgtcagtgtcatcgttacgaggatagagcccatcgcgttcgggacgatatgcttaaacaaaagccggccggttttggcgccgagtgtctgtgaagcaagaacatactcctgattctttaattgcagcacctgtccgcggacgattctcgccatattgatccagcccgttattgtcatggcgacgataatggtgagcaatcctttcggcagaacaaccatcagcaaaataaccattaataatgaaggaacagcccacagaatgtcggcgatgcgcatcatcacttcatctgtgcgtccgccgcggaaaccggaaatgctgccccagattacgccgattaataaatcaagcacggcagctgcgacaccgataaagatagaaatccgcgcgcccacccatgtccggacgaatatatcccttccaaggtcgtccgtgccgaaccaatgatctttcgacggcgctttatccgcatttaatagattggtagtggcataatcataccttgaaaagacaggcgcaaaaatcgccatcagaataataagaacgatcagtacgaacccgaccatcgcaagcttattgctgcggaagcggagcatggcgtctttccagagggaaaggctttttttatttattttttcggcatcgccggcattagctgaagctggttcaaacatatttttaggaatgttctgcatggtctaggctcctttctttgctttggaaagcttgattctcggatcgattaatccgtacagcacgtctacaattaatacgcataaaagcaggagcacgctgaagaacacggtaactcccataatgaccgtataatcacggtttgtaatgctgtttacaaaatgcgcgcctaaaccgggaattccgaaaatggattcaatgatgaaacttcccgttaaaatggatgccgccatcggccccatatatgtcacgaccggcaaaagcgcgtttcgaagcgcatggcgcacggtgactgacggacgggaaagtcctttagcttttgcagtccgtatgtaatcgctgtttaacacttcaatcatgcttgaacgggagagtctggcaatgaacgccatcggcatggaagcgagcgcaatagagggcagaaaggtgtatgcccaggattcccaccctgcgaccgggaacagttctaatttaattgagaaaatatattgcaaaatcgtcgccaatataaagctcggaactgagatcccaaagatcgttaaaatcgcaatggtataatcctgccatttattatggtacagggcagcaagcaccccgaaaagcacgccgaacgctaaagcgaggagaatagcttctgcaccgagagtgaatgagacggggaagcctgaattgattaaatcattaacactttggcctttatatttaaaagaaggtccgaagtcccacatcgccacagattttaagtagctgacatattgaacgaaaagaggcttgtccaggccatagtgttcgtttaagtttgcctcaatttcaggcggcagctttctttcgccggaaaatggtccgcccggcgctgcctgcattaagaagaatgtggcggtcacaatcacaaacagcgtgatgatcatgtaaatgaatcgtttaccgatatatttcagcaaggtgaacacctccatgttttttacaattttatacttaatcagtaagaaaggtatatggggacatcctccccatataccttgggtcttttgttttcagaaccgtcttttattcaaaagaagcgtttctgaagtaaacttcgcctgttcctgtcaagatcacatttttgaggtttttatcctgcacccaaggatccgtatagaaataaactggcgcgaccggcattgcgtcaataaagatcttttctgcttttttcagctcttcgatacgtttatccggatccgtttcaagctgagattggttcagcagctttttaaactcaggatcttcccatccggtatcattgtttccgccttctttatcacggaacaattcaaggaagttgatcggatcgttgaaatcgccgagccagcccatacgcccgatttggtagttctggctgtgcagcttatcgatgtaaacattccattcggagttatcaagctcaactttgacgcccaagttctttttccacatttcctgtacggcctgcgcgattttcgcatgcgcgtcatccgtattgtaggacagtttgatcgccggaaggtcagaggcattcttgacgcctaattccttcagtcctttatttaagaattctttagctgatttgacgtcattgtctttgaaataaccttttgtgttatccttgaatcccttcattgacggcggcaccgcagccatggccgggatctgttcgccctgcgttacattttttacgatggacgagcggtcgatcgcataagcaagggctttacggatgttaacattgttcagcggtttcgcttctgtgttgaatttgtaccaatacacgcctgcgatcggttcaacgtgaagagatccgtcttttttcaaggtcggcagagattcagtcggaagctggccgagcggcattcctgcccagtcaagctcaccggcctggaattttttcagttcggtgttgttattgttaatcatcaccatgttgattttcttcaatttcacagcgtctttatcccaatattgatcgttcttttcgagcgtgatggaaccgctgtgtttccaggccgtcattttgaacggaccgtttgacacataattttcgcccgcgttggtgttccagtttttatgtttttccgcgattttcttgttgatcggcatatacgtatagaatgaagttaattgcgtgaaataaggtgtcgggttattcagttcaacctttaatgttttgtcatttacggcttttacgcctacatcatcaatcttgccttttcctgtattggcagcttcagcgcctttgatatagtagagctgataagcgtattgtgattcgttgttcgggtcaagcgcccatttccatgcatattcaaaatcctgcgccgtcacagggtcgccgttagaccatttcgcaccgtcacgaatcgtaaatgtataggtctttccgtctttgcttgtttcaattttagatgccattccttcttcaggctcacctttggagtttacgcgtgtcaatccttcaaaagtctgtcggattacgcctcctgacacggaatcattcgctaaacccggatgcagtgagaacggctcggttttaatattgatattaagtgaagtctgtcctttggtgtcttttttaccgccgcctgatccgccgctgaatccgccgcacgcacttaatacaagcgagaagataagcatcaaacctacaatagaccaacgctttttcatgcactaaccccctaatcaaatttttcagcctttactactaaatactcagaaatatcagacaaaataacttaatatttttctaaactttaattgtgttccgtcttttctgattattttatgtaaagaagctgtaacaatagagtgaacaagttcattataatgaaatgaataatttattgcaatactattttctcaatttaaaatatttaaatttggtcagtttttctgtcaaaaaggtgatacacttctatagtttaaagcatgacctaactaaatttttttattgtaatttccagttcatattgctttttacatataatattcgttatacgaaatgttgatatgcgttatcatttaagcattttcagttctttttgaggatttccacccctaaagcaaactggaaataagcttgtattcctctgatgacatttggctataattgatttataatagatcaatcaaatacatttgttgtgattgcgatgatgaagagtagtacacattttcatccgtttgaagagagtctgcggtgctgggagcaggtaacgggcgatgtggaatggacttctgagcagctgaccgaacgttagtaggcccagccggagcagcctccgttaccaacgtctcgagcgattccattgtaatggaataatcagggtggcaccacggttcattcgtcccttttttctacgggaagaatgggctttttttattatgttttaagaaatgaggtaagaactatgaagaaaacgattttttctggcattcagccgagcggttccgttaccctcggcaactacatcggcgcaatgaagcaatttgttgatttgcagcatgactacaacggctacttctgtattgtcgatcagcatgcgattacggttccgcaggatcggcttgagctgcggaagaacatccgcaatctcgcggctctttacctggccgtcggacttgatcccgagaaagcgaccctctttatccagtcggaggttcccgctcatgcccaggcggggtggatgctccaatgcgtcgcatatattggcgagcttgagcggatgacgcaatttaaagataagtcaaagggcaaagaagccgtcgtgtcaggactgttaacctatccgccgctgatggccggcgatattttactgtacggaacggatcttgttccggtcggagaagatcaaaaacagcatcttgaactgacccgcaacctggcggaacgctttaataaaaaatacaatgacatcttcacgattcctgaggtgaaaattcctgaatcaggcgcgcgcatcatgtcactggctgatccgctcaaaaaaatgagcaaatcagatccgaaccaaaaggcattcatcacgctgcttgatgaaccgaagcagctcgagaagaaaatcaagagcgccgtgactgattctgaaggcattgtaaagtatgataaagaaaacaaaccgggcgtttctaatcttttgacgatctattctattttaggaaacacatcaattgaagaattagaagctaaatatgaaggcaaagggtacggtgaattcaaaagcgatttagccgaagtcgttatcggcgcattgacaccgatccaagagcgctaccgtgaattaattgagagcgacgaacttgaccgcattctcgacgaaggagcggcacgcgcaaacaaaacggccggcaaaatggtgaagaaaatggaaaacgccatgggtctcggacggaaaagaagataaagaaaagaggcgggagaatccccgcctcttttttagttcacttttgattcctgttccatttcccaaagcttttcgaaaaatggctgccctttaatcaaattttcacagaacgcaagatgtttatctgaccagccttcaattgtttcattgtaaagcatgtcccaaatctcttcaaagctcatccgtttgatctgctcgtacatatgcggattccactccgtgtaccaatacacaatttccgcacggtttttcagccctttcagctggtcgagcgccataaacatcagctgcttgatctgccgctcttttctcgtcagccctctgacgtgctccggcgccaatgacaaaatgtgatattcctttgaagactccaattgcgccggcttaaattgaaacgattccggttctacatcctttaccatttcataaacaagctgctcctgtctcggaatcaggcggctctttctgaccggaatggtatacccgatcgtatccacggcaatgatgccgatcccgtctgtcacgacaaaacaatactccagctttgtccgctcatgattttttcgcacgtatgacttttggtggacttggtcaagcagctctttcggaagctctgataagtcgttttctatgtaatgaaataataccgacggcactctgagcagcggcgtctgatccaaaagttcaaccgtgtcttccttccgccattcgtgaaaatggcatacattgtagccgttttcttccccttcaaaccaattgacccatacatcatgaagaaataacatattcgacccctcactttataaaaactgttgtccacagtataggcaagggatagataaattattccatttcaatatgagatttccgcattacggagctggatttccgactgcatcgcaacaaaaaaatctcccgttccgtccgggagatcatttcacatttttcggatcaagcgcatcacgcagcccgtctccgacaaagttaaagcacaatacggtaagaagaatcaacaaccctgggaataacgggtaccaccaagcctgaatcataagcgtaaagttctgtgcatcctgaagcatattgccccagcttgcgatcggcggctgaatcccgaaaccgagataacttaatgtagattccgccaaaataaccgttcccacctttaatgtggctgagacaataatcggtccgagcgcattcggcaatatatgagaaaagatgatgtgatgattttttgtaccgatcgtctttgcagctaatacaaactctctggaacgaagcgataaaaactcccctcggacaagacgtgccgttgttgtccagcctgtaagggagaaaattaaaattaatttatccattccgggctggaaaatcgtaacaagtgtaataagcaaaaatatatcaggtatggataatacgatatcaacggttctcatgagaacggcatcgacaatccctttaaaatatccggcaacggctccgacaactgtcccgattgtaatcgcgccgatcacagaagcgaatccgacaagcaaggagacgcgcgccccgtacagaaccctcgtaaagatgtctcttccgaatttatcagttcccattagatgttttaagctcggcggcttcaaacgattgataagagattgactctccggagagtaaggagcgattaccgaagcgaataaggctgacaagatgatgatggttaatataacggctccgattacagctagtttattttgaaagaacttttcgaaaaaaatcttcgtcattgtttccggtttggattgaatattttcctttaattttacttcgctggggggtgtgccggtatttggctgtaacatttgacctctcacctctctttgttaatattcaatgcggggatcaaccagcgcatataagatgtccgcaattaaattccccaccacaaccaaaacagctgaaatgaccgtcatggccatgataaccggataatcccgcgaaaaggctgaatcaataaacaatttaccgagacccggccaagtaaaaatctgttctaccactaccgctcccccgataaatgacggtatcatcagaccaaaaatagtgatgacaggaagaagtccgtttctcaaaccgtgtttaaaaattactttattatctcggaatcctttcgcacgcgccgttcgtatataatcctgttttaacacatcaagcatactggatcttgtgtatctcgttatccctgccatgtctgccgtagcgagcacaaaagcaggcagaatcaagtgatgcaatcggtcaaatatgttaaagtcagcattcaaagtgcttactccgccagtgggaaaccaccccagatttacagataaaaccatgattaaaatcaaaccgaaccaaaaattcggaatggcaagccctaaaaatgaagtaacagttatcccgtaatccaattttgaataaggacgtttcgctgacagaacaccaaatggaatagaaataagaagagcgacaagggttgagaaaagcataagcacaatcgtattcggtaagcgggataagataagttcagaaaccggagtgcctttcttgacgatagaagtcccgaaatccccttgcagcatattccccagccatttcacatattgaacaggttccggatcattcaacccgtatttttcaatgaattttgccctgtccgcttgactgattgtagggtccatcataagtgacatcgggtctcccggcgctgctttcatgatggcaaacgacaaaattgtaatgcctaagagaatcggcaaggacattaatgttcgccgtaaaatatatgtaaccatgttcttgtcccctttttaaataggataagagaggaaaggaacctccttccctctccagggcttttgctatttttgatccagccaccatttttcaatattgtacaagtcatttttagggtggaatacataaccttgtaaattattcggcatcgctctgtggtaattgtaatagaataagaagctgtacggctgatcttcagcaatcaatttgtatatctcttcatacttcttttggtattcttttctgtctgtaattgtcttcgcttcttcaagcagcttatcgactttcgggtttttataccagatattattcagcccgtttttcgattggcttgaatggaagatagagaattgatccgggaacgttgcaagactccatccgagaagaagagcgtcataatcccaattaggggcacttgtctgttcgattaacgcactgaattcaacaattcgcggtttagcctcgattcccacttcttttaattgctgctgaacgacaacagctaaatcttcacgaattttattgccttgattcgttttaatttcaaatgagaatttttttccgtctttatcaaggtagccgtcaccgtcatggtcttcccatccggcttcttttagcagctgctttgcttttttcggattataatcaaatgtcggcactttagacttcggataattccatgacagcggactctcaggaacatccgctaccttaccgtctccgttcagcacttgatccaccattgcctgcctgtcaagagcgtaagtcaatgcctgacgcacttttttgtctttaaagatctcttttttctcattccagccgatatagctgtagtttaaaccaaggtcagatttgaccttcacatttccaaacgttttaaccgtatcaaaatctgtgcccggcacaacgaagaaatcaatatcccccgcttttaactgagccacggccgcgttagaatcaggtattgtttttactgtcactgtatcaaggtaaggtctgccgccaaagtaatcatcatttgcttccagtttgacatactcgccctttttccactcaacaaacttaaacggaccggaaccgattggatttttacggttaaattcattctctcccagatctgcaaccgggaccttacccaatatatgtttaggcaaaatgccgtaactgtcgagaacgacattatagaaataggcatcttttttcttcattttaaactgaatttcatattttccttttttcgttacggatttaagggactcaaaacccgagccacgctcaccgttgtaatctttgttaagagggatgctgtaggtgaaaacaacatcatcggccgtcagctcttttccatcatggaatttaacgccttttttcagttttacatcatacgttaatcccccgtcagcttctgttactttttcagccagcgacggcttgacgtttaatttctcatcagtttccaataatgtgctgtaaagcattccttcaatatcagaacttgcaacatcagtagaataaagtggattaaaaagtgtgggttccccggttgacccgacaaccaaatctccgcctttttgcggttttcctgccggtttggattcggtgcttgtggattttgagccggagcaggctgacaggaagatggcaaacgccataaaaacacttagcatcatcagtgcgcttttacgtaatttcatatcaattccccctttgtgatatatatgcagcaaactggttatgtaatccggcataccccctctcgatgcttgtcatttcaggcatataaatggcaggcaacgtaatggccgggagcggcttcttcaaatgccgggatttgttccttgcagatcggtttggccatcgggcaccgcgtgtggaacacgcagcctttcggcgggtttgccgggcttggcagttctcctttcaggatgattcgttcccgcttgacggcgtctttttttctcgtgacgggcactgaagacaaaagcgcttgcgtataagggtgaagcggattgccgtacagctcgtgtttatcggtcagctccatcatttttcccagatacatgacgccgactctgtcgctgatatggcggacaacactcaaatcatgagaaataaacaaataggtcaggttgaattcatcctgcagttcttccatcagattgatgacctgggcctgaatggagacatcgagtgcggaaacgggttcatccgcaataatcagctcgggattcaacgtcagagcccgcgcaatcccgatccgctggcgctgccctccggaaaattcgtgcggatagcggtttgcaaagctcggatgaaggccgactttcgccagcagctcctccactcgctcgttccgctcgctcatgctgtacatatggtgagtctggaacggctctttaataatggaacgcagcgttttcctcgggttaagggatgcgaagggatcttggaagaccatctggatgtttttgcggacgctttttctcagcttttcttcagataagccggagatatcctgacccttaaaaagaatccggccgtctgtcggcttgtataaacggatcatcgtccttcccgccgttgatttgccgcatcctgattcaccgacgatgccgagcgtctccccgcgcttcagtgaaaaagaaacaccgtcaacagcctttatatcaccgactttcctttgaaaaaaaccggagcggatcgggaaatatttttttacgtctttcagctctaaaatcgtttcttggcctgcagctgtcattttgattgggcaccctcttcctcatataaaaaacatcttacagaacggccgctttcatgcgttatcagctccggctgccctgttttacatttgtccatcgcttttgaacacctcggggcaaatcggcagccttccggaagattatccggtgtcgggacactgcctttgatcgcttttaatgtatcaatctctccatctatcaccggtatggagtttaacagcccctcggtatacggatgaagagggtttaaaaataagtcctccacactcgcgctctctacgacttgtccgcagtacatcacgatcaccctgtcggcggcttcggaaaccacacctaaatcgtgagtgatcagcagaatggaagtatcgaattttttgcagaggtctttcatcagctccaatacttgggcttgtatcgtcacatcaagcgccgtcgtcggctcatcagcgatcagaagcttcggattgcagctgagcgcaatggcgatcatcaccctctgtctcatccctccggaaagacggtgcggatattctttcattacttgttccgctctggagaatccgacgagttccagaagctcaacggcttttttagccgcttcttttttattcatttttttatggtattcaagcacttcggtaatttgttcgccgatggtcagcaccggattcagggaagtcatgggctcctgaaagatcatagagacgtcatttccgcggattttgcaatattcgttttcggtgaaggaggccaggtccctgccttcaagcttaatcgagccgtccataatttttccgcccgagccttggacaagtcccataatagaaagcgaggtgatgcttttgcccgagccggattctcctacaagagcgacggtttcgcctttgttaatgtgaaaatcaaccccgtcgactgcggggatcggctgtttctttctgaaaaaataggtctttaaattattcacttctaatagtgtgctcatgatacgcccctttctcattccgctgaagcagagggaaacatacgtttcgctatcacaaaatatagaatagtcgaaaaattttatagttgtatattattacatcattattacaaaagcaagaattttttaggataaatgtaatatccttaaataatttccattcttttaatctattaaagcgttgcctccagaaaggtttttgaagggatggccaatgcttcttttactgttttttgatggccggttaaatatttttttactatattgaatccgacggcatagccgagcattgaggggaagtatccttttccgtataacagctgggaaaacattctgctgtctctcgttaagcggaggttcggcttgactcttttttcaaacagaaaatcaagctgctcaggcgtatagtaggacgtccattccgccgtaagacttgagccgaaccgctcatatacagcatattctgccagcccctccatcatgattgtatcaagaaatgtctcatctttttcgtcctttgtcacatgttctaaccggcagacgtgattatattcatgtgtcataagggcggatacagctgaattggaactatccgacgatagaaagaggaacattttgtcccgaaaggccagaccggattttgatccgaattcctgacggattttccggtttcgttcgtcgacgggcaaaactacgatcggcacgtccggcccgttccacttctcctttaaataagcttcctccttttgaatatggctgtagcatcctttttctttcagccgtttactggtcctaacgccgtccttcaaatggcggaacatgccgtggttttgcagcatcccgagtatcggcttccactctttcttatcggcccctgcaaaaagcggcaaaagatgcggggccagatcatttacggatgccgccttttccatccattgatatgtctgcttgacgctcataccggttcgcctcctcttgttgttatcatatgcacacacaaaaaaaccggccacctttttcaggcagccggtcaaaactgtattattgatattttttaaagatcaaagtggcattatgtccgccgaagccgagcgagttgctgagaacgatgttgacatcctgctcgcgcgctttgtccggtacataatctaaatcacactcttcatcaggtgtttcgatgttaatcgtcggcgggataatgctgtctttaatggccatgacggagaagattgcttcaattcctccggcagcgcctaacaaatgacccgtcattgattttgtcgaactgacggcgagcttgtacgcatgatcaccgaaaacggtcttaatggcttttgtctcgtatttatcattgtagtacgtgcttgtgccgtgagcgttgatgtaatcaatttcttcaggcttgatgcccgcatctttgattgcttcctgcatcgctctcgcaccgccttctccgtcttgggcaggcgcggtaatgtgataggcatcacccgttgagccgtagccgacaatttccccgtagattttcgcaccgcgggcaagggcatgctcaagctcttcaagcacgacgatccccgcgccttctcccatgacaaagccgtcacggtttttatcaaacgggcggcttgccgttttcggatcaggatttgtagaaagggctttgtttgcgctgaagcccgcaaatgacattcttgtcagcggcgcttccgttccgcccgtaatcatcgcatcggcatcgccgcgctgaatgactttaaacgcgtcaccgatagagttcgttcccgtcgcacatgccgtcaccgtacaggagttgactccttttgctccgagagcgattgagatttggcctgtcgccatatccggaatcatcatcggaacaaagaacgggctgacccgtctcggcccttttgtcaggaagatttcgaattgggattcaagcgtttcaagaccgccgattccggacccgacccaaacgccgactctcggcgcgatctcgtctgtgatgttcagaccggcatcttgaacggccattttcgcggctacgacagcatattgcgtgaagcggtccatttttcgcgcttcttttttatccatgtaattttcaatattgaaatctttcagttcagcagctactttcgccggatactcgtccgattccacacgtgtgatcggtccgattccggatacgccgccgattgcatttttccagcttgtttcggcgtcgtttccaagcggagacagggctccaagccctgtaacgactactctttttttactcatcttgtgtgcacctcacctttttttatcgtccccagcgtattgctatggcgccccatgtcaatcctccgccgaaaccgaccatgacgatgacgtcgccgtctttaattttgcctgcttccagttcctctactaatgaaatcggaatggatgctgcggatgtgtttccatatttatggactgttttagacatcttttcaaccggaagctccaaacgttcccgtgccgcttccatgatgcggatgtttgcctgatgcggaatcaaaaagtctacgtcctctttggagaggccggctttttcaatgacatttacactcgattcacccatttgccggacggcgaatttgaaaacttctcttccatgcatgattgtatgtcctttttcatctaagtacaagtgctgaccgcctgtaccgtctgctccgagctcaaatgacagtatgcctctgtcgtcgctgaccggtccgatgaccgccgctccggctccgtctccgaacagcacagccgtattgcggtcgtcccagtcggtaatgcttgagagcttttccacgccgaccacgaggacatgtttgtatgtttgcgattcaatgaattgtttggcggttacgataccgtacataaaacccgcacatgcggcgctgatatccatcgcgcacgcttttttggccccgagcttctcttgtatcatacaggaaacggtagggaaggactggtcaggagtaaccgtcgccacgaggatcatatcaagctcctcagcggaaatgccggcctgatcaagcgctttttgcgcagcctcagcggccatgccggatgaatacatatcttccgcggcgattcttctttcttctatacctgttctcgtacgaatccactcgtccgatgtatctaccatttgttcaagatcatgatttgtcagcactttttccgggatgtaacggccgacgccaagaattccagctttcattggaaagactccttttttataatgaatttaaaactaattagttatgatcaattattagtatcaggtactaattctaccctattttttttctgttggcaatatattcgtctaaactatcggacgctgctcctcatagaataaaaggaagacgaaaggaggcttcactatggatattttctccaaaatgatgttcggcgattccagagaccgggataaagaaccggaagaaaacccggagcagcctcaggctgaaaacgaagaagagatcgattacaaccacgtgatgaatcagctggggtccatcatgaactctctggatcaattaaagcctgtatttaaagacttcgcgccgatggtgtccgctataaagaaaaaaatcatgtgaaaagccacttcatgaaaagtggctctctttatttattcagctccccggcatcagatctgccaagctcatacgcttccgccatgaccgatgtaaacaggtccataaacggctgaatcatttccaaagacagatctatgccggatttctcaagctccgcctttgcttccggcaggtatttcatcgcgatctgcataaattcaagagacttttcatgctgcatgtgtatccacctctattcatttgacggcagttcatttgttcggttatacgtttttacaaggtctgagattttgtcttgaaatgctttgtccaccagagggctgaacgtccccatttcaacgactccttccctgaaatcaaagttgtgatctccgctcttgagcgtacctttattatattgctcggcaattaatgtataggctttatctacgttttgcaccgtgcttgtcagcaccgtgtttttgccgagattcgattgctcggcgacatagccgatggcgtaaagcccgtcttttttgatttgctgaatgacaggaacattatacccgtctccggccggatatacaacatccgtgccttccgcttttaacttctcgtaaagatgcagcgcttcattgccgttatcccagtggtccgtaaattcagtattgacggtgatatcaggcttttcatatttcgcccctttgataaagccgtctacttcaggctgccacaaaaaggaggcgatgacgccgacctcattggtttttgacatatgggcggctgtcattcccccgaaaaaacccattgcttctcccataagatgaacgcttgtgacattatcgcttttcgccgttccgtttgcgacgacgaattccatgtcgggataatccttgctgatcatattgaagatttcctcgtattcatttccgtgcccgtataaaagattgactccttttttatgaaaatcatctatcgcttttaaaatatcttcatcggatctgatattttctttataataaacgtcaacgttaaattcagattgtatcgctaataaacctttgtaaccttttgtgccccataccaagtcactgatagtatcgggaaaaagcattccgaccttctcaatttttcctttaaacggagtttgtgcgcatccgctcaataaaaggaggacagaaaagatcatgacaagcctggtgatcaagccatgttcaaccccttttcaaactcataacatgtataattgatatacgtttattgtagcggtaatgcacataacatggaaggtatttcttaaaaaatgtcgaatattgatgaaaattgtcttttccattctttaattttttcttccgcttccgttttttgcgttttttcttttatttccagggtaataatctgattttcgtcttctgtgccgtatgcctcaagctgattcatcagcccgcagactgcgtcttctaaaaagatcctgctttcgccatcttcttttgcttctgtccacggaccgtaaaggggaggaaggataatcgcttttgccgtatcccgctgaccgtttttttcccagtctccgtgatcctcactgtaaacaatccaatataaaggctcagccctttcttcaggcagacacccgctcccgtattgaacgcagatacgatcgtattccttttcaccgatttcatctattatttgaaaaagcccgtttctcgcgagccacattaaacgttcttctaaatacagctgcctcgttttgtcctccggttctgccaaaatgacatcaacatgcacaccctcatccatcaaccgttcgcacaatgaaaggccgagaaattcatctgctccaatgatcagcgctgtcttcatcacatctgccgcctttccggtttttcattcgcacacaagccaaacagccctctgaaaagagatggctgttgtattctattcattacaggtctttttcatgactgcggaaaaaccggcagatggctctgtacatacgcgcagggttctcaagcaggtgatacgtgatatcagtcttgcttccggtcttttcccgggcttctttatacgcattcgcatgcagggtgtacgggtacggcgctccggtcgttctttgccatatatgtaccggcacgcgggtgcggcagccggtaatggtctgatagctcagtgagcttgcctctttttcagaaacaccgaagctctgtgccgtttccctcagaaactgcttataaaaaaacttattttctttctctgattcaaaatgggcttgaaggtcaagacaaggatctaacattgcggctgaacggatatgctccgctgaagactgcagcaattgatcggcgataagggcgcccatgccttctgcgagcaagtgtattttcggattgaggatttcttgtttcagcacataatgaatcagctgtctggcgtaaaggacggctttttccgaaccccaatgccgtccgtataaattgctgttaaaaatggtgtatcctctgtcaagcatcgtatttaacagctggtttctcccttcatgttcgagccaaaagcttgagtcccggctgacaaagtgggttctgtcccccagaataaagatacagaagccattcggccgatacggcagatggatgacgttcagctcagatccgaattggaaaaatctttccgtaatccccatgcctgcccgcctccttttactcctaatctctctattggctatcatatgtaagaagaatgaaaacggatcggataaactcctatttgctgctatgttttggctattatcccgagcacaggaaccgaattttccatcagacggccggacaggcgggcaaatgtcagtttcaggcgcgctttttgatgagaaaatgaccttccgcccgcgctttatgtatggtatgatacaacgtagaataaaatgaaggacgaggtggaaacgtgcggtttattatcggttttatttggacgttccttttaacacatatggcctgttatttggtcgcctccatgaacagcgcggcgtacaatttcaagcaatcatccgttattgccgtggttattgcggtgctagtctttgttcttgcggagatcatgcctgtcaaacaggatgcaagccagcattaaataaaaaaacctgctattcagcaggtttttttgtgttcacggttttcgttgatacgtccacaatctgttgtggtttgaagtttcagggaacatttcccccaccgtaagcttgattttttgcgggtttttgaccatgcttcccgtttcgccgatttcaacgtacacaccgttattcggcgctttttgtcccgggcggaattgatgctgctgtcccacgtcatttcctcctttttcttttttatgtagtatgcgcttgtatgcggagaaatatcaaaaaccgctgaatgagattcagcggtttttttgttcatcctgtttgtaaagaagagctttcaggagcgctttttgcgcgtgaagccggttttccgcctgctgaaataccgcagagttcggaccgtcgataatctcggacgtgacctcttcttcccgatgcgcgggcaggcaatgcaaaaatgtatagtcgggttttgcgagactgacgagtgaggcgttgacttgatacggggcaaacacattcagccgctgctgcgtctcttcctcctgccccatgctcgtgaagacgtcggagtaaatcacatctgcatcccgcaccgcttcctgcggattttcggtaagggtgattttcgctccggaaacagccgccgcttctttcgcggcattcaccgcctcttcctctacttcatagcctttcggcgaagcaatcgcaatgtcacagcccatttttgcgcagccgatcataagtgaatgcgccacattatttccgtcaccgatataggcggcttttactcctttcagttttccttttatttcttgtatcgttaacagatccgcgagtgcctgacacgggtgataccggtcggtcagcccgtttatgacgggaatgtctgcatgctcggcaagctcttcgactttttcatgctcaaaggtgcggatcataatggcatcaacgaagccggacatcaccttcgccgtatccgcgaccgtctccccccgcccaagctgcaggtcgctgcttgaaagaaatagtcccgttcccccgagctgggccattcccgcttcaaaagacacacgtgtgcgggttgaagatttttcaaaaatcatcgccaatgttttcccttggaaaatcggctgtatcggatgttgttttaataatgaagcttctgtcagaagcgctttgatgtctgacgggctgacatcttttaaggaaagaaaatctttgccgtacaaatgggttaatgtgtgttccgcttttattgtgtgcatgatgccacttccttttgataaagatctttgagcgatacaggctcaggtttgccggagccgcttgctaaaaatgcctttacggtttccggttcagtaaagaccgtcacaccatgcgtcatggcttcgatccgttgtttacgcgcttcttcagagtgattgaaattgatatggaccgctttatcctttcgctctgcccatgccgggaacgcatctttgcataccgtaaatcccgcctcttgagcctgacgttccaattccgcatcacagccttccagatagatgctgccttttttcacccagacgtgcgcgtagatttttttcagggcgctttctgcgtcaaacgcgacacacatgccttctccggtcgacttcatttccggcccgggctttacgtccacatcctgaatggcgtgcgaagaaaaaaccgggaatttcactgccgttccgtgctgattttgaacctcgggcttgatgtctttaagggaagcgccggccagcaatctggcggcaagcgggatcatcggcacccccatcaccttagacacgacaggaaccgtgcggcttgcccgcggattcacttcaagaacgagaatatcccctttgtcatcaatgacaaactgaatgttcatgatgcctttaaaagccagttttaccgcgattttttcggcggcctcttttatattccgctgcatatcaggtgtgacagacggacccggaagaatcgcaaaactgtcgcccgaatggacgccggcgcgttcaatgtgctctgtgtaagtcggcacgaatacttcatgtccgtcggaaatcagatcgatctccaattcttttcctgtaatgtactgatcgatcaaaatcggatacggcatgcccgcttcatttgccagcagctctgacatttgcgcttctgaatcaacgatgatcatgcccatcccaccgatgacataagacggacggatcagcacggggtagccgattcggcttgctttttccgttgcttcttcttttgaataagcggtttcgcctttggcatgtttcaggtcaaggtcatcaagcagctgataaaacagatcccgatcctccagcgcatcaagggtttcaaaggatgttccgagcagcggaatgcccgctttttccagcggttcagcggcattgatcgcggtctgccccccaaactggacgatggcaaaatcaatgttttcatgttccgccacgttcaaaatatgttctgtcgtcagcggttcaaaataaagccggtcagcgatttcataatccgtgcttactgtttccggattgttattgatcataatcgtttcataccccagcttttgcagggtcagaacgccgtggacggcactgtaatcaaattccactccctgaccgatgcggatcgggcctgagccgatgatgagggcgcgttttttctcttttcggctgatatctccgtcgctttccccgaggtaggtggagtagaaataattcgtcttggcatcaaattcagcggcgcatgtatctacgattttaaacgacgggacgatgcctgatttctttctgagagcacggatgtcttcttccgtttttcccgtgagagatgcgatcatgacatccgtgaagccttttaccttcgcctgctttaaaagcggcattgacagatgatccccttcttccatcagcttgttttccaatgtgatgatatttcggaatacatggagaaaaaacgggtcaattttcgttttggcatggatgtcttctatcgtttcaccgcggcttaacagttccatgacgacgaaaaatctccggtcatccggcgttaccgctaattcccacagctgattgatcgtacagccgccgagttcaggcaggcgggtgccgatcgttttcagctcaagggaggccgccgctttttgaatggccgcttccatatttctttcaatcgccatgacctctcccgtcgctttcatcttcgttccgagcgtgcggtcggcatgtttaaatttatcaaacggccagcgcgggaatttgacgatgacataatcaagcgccggttcaaagcttgcataagtagagcccgtcagcggatttttcagttcatcaagcgtatagccgacggcaagtttcgccgccattttggcaatcggatagccggtcgcttttgacgcgagagctgaagagcggctgacacgcgggttcacttcaatgacatagtactgtttgctgaacggatccagcgcaaattgaatgttgcagccgccgaccacatccagcgccgaaataatcgccaggcttgctgaacgcagcatctgatattcttcatccgttaacgtctgggacggtgcgacgacaatggagtcccctgtatgcacgccgacgggatcgatgttttccatattacagacggtgatgcatgtatgattgctgtcgcgcatgacctcatattcgatttctttaaaaccggcgatgcttttttcgacgaggcattggctgatcgggcttgctaacagcgcctgtttaataagcgtctgaaacgcttctttcgttttcgcgattccgcctccctttccgcctaacgtgtacgccggtctcagaatgaccggcaatccgatagactcagcgaaacggagggcgtcttcttcgttgtcgacgatttcgctttccggaacgggctgatcgagctctttcatcagggcgcggaactgctcccggtcttcgcctttttgaatggtttccaccgatgttcccaaaagcttgacgtgatgcttcttcagcacgcctgcttcttcaagcttaacggctaaattcaatgccgtctggccgcccaaattggcaagcagaccgtctggtttttctttttcaataatggcctcgatgctgtcggttgtgagcggttcaaaatatatttcatcggcaaacgcctcatccgtcataatcgttgccgggttgttgttgactagaataacgcggtatccttcttctttcagagccatgcagccctgcgttcctgaataatcaaattctgccgcctggccgatgatgatcgggccggagccgatgactaatatgctggaaatggttgtatctttaggcatgagcgatttctctccttgctggtatcactttctctagaaattcatcaaatatccactcgctctcagccggtccgggatgagcttcagggtggaactggacgcttaatacgggaaggcgcttatgaatgagcccttccactgatgtatcattgacatgatgaaatctgatggacagctcgttttcgtcaattgatgcttcatcaacgacatagctgtggttctggcttgtcataaacacccgtttcgttttccggtcaatgacgggatggttggcacccctgtggccgaacggcagcttatacgtatttcctccgaaagccagggcaatcagctgatgcccgaggcaaataccgagtgcggggaaatcactgagtaatgatgtaatccggttcatgtacggcgcaatcgctttcgggtcgcccgggccgtttgagagcacgattccgtcaggctgaatgtcgtaaacagcgttcatctgctgatacggaatgaccgttactttacagccgcgctttacaagtgacgaggcgattgattttttataaccgaaatcaatcagcgcaatatgccggtctccattccccattgacgtgatgtcttcagactgcgccagctccgccgggttttctgttccggatgctgccggaatttctcctgttgttgacacggcagcgttcatcgtgccgccggagcggatggttttgacgacggcccgtgtgtccacttcggttaagagcgggatgttccatttatttaaatactctctcaagcttgagactgcttcatggtgagaaaaatgttcacacgcttcatagacggcaacagccttgacttgaggaatcttactttcaaggtctttttcattaattccgtagtttccgatcagcggatacgtaaagacgacgatctgacccttatatgacgggtctgtaagcacttcctgataacccgtcattccggtgaaaaaaaccgcttcgccaacacagcgggcttctttttcaagttcaccgccgaatgatgttccgtcttccaatactaaatagcctttcatctaaagcccacctcttgatgaataattaattaaaaatatgaatttttatacttttatatcgaaaaaaaattaccgtttcactgccgaatgcgcttcgatcgctgctttcagcatactgacggccgacagcatttcttcttcagaaaccgtaagcggcgggagcagcctgatgacattcggtccggccggaagcacgagaagcccgcgttcctgcagatctccgatgatgccggacacgggacctgcgcattcaatgccgattaataacccttttccgcggatttcttttacaaaaggccctgtcagttcacggttcagctgcgcttttaaaaatgatcctttgtctgccgccgcctggagaaagtccggctgaaacacaatgtccaaggttgctttcacagctgccatggcaagcttattgccgccgaaagtcgtaccatgcgtacccggcgtaaaggcgtcgccaagcttctttttgccgatcacggctccgacgggaaaaccgtttccaagccctttcgcagcagtgatgatgtccggcgagatgccgaaatgctcatagccgaatgccttgcccgtccggccgattccggtttgaatctcgtctgcgataagcagcgcctgtttgtctttgcaaaatgtctgtaaggcttcgatgaattccggatcggcgggattgactcccccttctccctgcaccgtctcaagcatgacggcggcgatatcatcctcttttgaaagcgtgctgaatgccgacggatcattgaacggaagatagtgaaagccttgaagcatcggtccgaaaccggtcttgattttgtcttgtccggtggcggccatccccgcataggtccgcccgtgaaaggattgatgaaatgttacaatttttgtctttcccgttgctttacgggcaagcttaatggcgccttcattcgcttcggccccgctgttgcagaagaaaacgagatcccccgcgctatgttcggcaagctttgccgcggctttttcctgaagatcattttcaaacagattggaaacgtgccatacgctgtcaagctgttctttcaccgcttctgtgacctcatcatgacaatggccgagattggaaacggcgatgccctgaataaaatcgagatacgtttttccgttttcatcctctgcaattgtccctttcgcttttttgatatcgatgggccagcgactgtaggtttgaaatagactgctcatgacacgctctccttttctttgacaatttttgttccttggaaggcttgatcggtgaaaaacgctccttttccgtttacgatcatcacttcctcgacatcttcactcagtgccgataatgccgagtttaccttcggaatcatccctcctgaaatcacgccgtcatctatgagggcctgaatctcttgcggcgtcaaagtatccagcctgctctctccgtccataattccttcgacatccgtgacaaataaaagtttgtcggcgtgtaaggctgaagcgacggccgatgccgcggcgtctgcgttgacgttcagcgtttcgaaatcacttgtcatggaaagcggagcgataacgggaatgatgccttctttcattaatgcgtgaatgattgacggatcggttttttgtatttcgccgacttctccgtatttgtcttgattaagataggatgcttgaaggagaccgccgtcctttcctgatattcccgcggctttcagcccgtttttcgcgagttcggttacgaaaaatttattgatcgtccctgacaagaccatttccgctgtttccagcaccggtttggtcgttttccgctgtccatcgacaaattccgtttcaatctgcaatgttttcagcatttttgaaatgtccgggccgcctccatggacgacggcaatgttccagcccgattgcataagctcttttacattttgaaaaaaatcggcggataactcgcggattacgctgccgccgcacttaaaaacgatcgttttcttcatgccgctcccctttgttatgtgcgatagctcgcattgattttgatataatcataggttaagtcacagccccatgcccggccgctgccggagccttcctgcaggcggactgcaatcgtaatctcatcacctgataagtactccttggcatcagtttccgaaaacggctgaggttcgttgtgtttaaacagacactggccgccgaggaaaacttccacttgttcggccgttacgcttgccgcactgtgcccgattgcgccgatgatgcgcccccagttggcgtctgtgccgtaaacggcggtcttcacaaggcttgagccgacgatttttttggcaataatattcgcctcaaggttatttttcgcgccttcgactctggcttcaattaatttcgtcgctccttcaccgtctctggctatatctttggcaaggtcttcgcatacaagctttaatccctttttaaaagccggccagtcagggtgctgctccgtcaggcaatcattccccgcgcagccgtttgccatcacaagcaccatgtcattcgtcgatgtttctccgtcaacggtgatttggttaaatgaaacatccgtaatctctctgagcgcgtttttgagcgcctgttcttccacggccgcgtccgttgtgacaaagccgagcattgtcgccatgttggggtggatcatgccggagcctttcgccgctccgccgatcgtgatgatgtctccgccgatcaccagttcataacacgtctgtttcgtcactgtatccgtcgtcaaaatggcttcttcaaatgctccggacatggatggcgcttgaccgagctgttcaatgcccgcttgaatttttttcatgtctaaaagctcgccgatcaccccggttgacgaaaccgcaacaagctccggctcaatgccgagctggctcgcgaagccgtcccgcatttcataggcgtcctttaatccttggtctcccgtacaggcgttggcaatcgcgctgttgacgataaccgcctgaagcataccctcttttttcaggctggcttgcgtcactttcagcggcgctgcctgaaaatggctctgcgtatataccgctgcactgactgcaggcgcttcgctgataatcgctccgagatctttttttgaatagcgcagaccgcaatgcacgccctttgcctcaaaccctttcggcgaggatacgccgccttttattttcgtgatttcctcactcagctgaatcatatttttgaatccctctttcgttctatggatagactggcgtcatcgtaagtcccgtttcttcctgccagccattcatgatatttaaattttgaaccgcctgccctgcggcgcctttcatcagattatctatgacagaaacgatggtggcacggtttgttctttcatccacggtgacactgatatcacaaaaattgctgccgtatacctctttcgtcgccggaaattcaccttccggcctgattctgacaaaatatgaatctttgtagaattcggaatacaattctcttacctgtgcagcagacatacccgggggagcctccgtatacatcgtcgccataatgccccttgtcatcggcgccaaatgtgcggaaaacgtgatcgggcctgtgccgggctgccaagccgctaattgctgttcaatttccggagtatgctgatgctcattaaccttataaattttgaaattatcattcagctcagaataatgagtgcccatggatgcttttcggccggcgccggatacgcccgttttcgcatcaacaatcagaaatgaatcttgtaaaagcttattcttcgccagcggggcgagcccgagcagcacagccgtcggaaaacatcccggattggcaatcagctttgcagtctgaatctcttctttttgcagttcagctaaaccgtaaaccgcgctttgaatcgttcctttcggagcggccttccgcttataccacttttcatacacggccgggttttgaatccgcagatcgccggatagatcaatgaccggaatgcccgcctccgccagcttgggcgaccactctccggaaacgccgggcggcgcggctataaacatgacatcaatttcgtttcggatcgtttctatatgaagcggccgaagtgattgtgacgctatattcctcaaatgcggatatgaagcggcatattcttttccttcgtcgctcgatgaatataatatacaatcttctgcataagggtgatggttaagaatcctgacaagttcggcgcctccataaccagtcgcgcctataatacctattttcaacgggttcaccttcttggtttttgtgaaattatttaacattataacatgaataaaaattaattcaattgtatatttaatattttttcattcattttccatctgttttcgctgacaaaaacccccctctcgatcgagggggcataagaaaaacaggctgatcggatcagcctgtttttttcagcatcatcagcccgcttataaaaaacagcacggagctggcgtaaaaaataatataaaccgtaaagaaatcagcgagaaacccgccgagaataatggcggcagctgaaaatacggccgtccagaaatgatagctgccgactttttttccccgctccccgccgtcggtgtaatcggcgatcatgattttctcgccgtgtttttgcatcgcgccgaacaggcccaaaagcacctgcacaacataaacctggtgcacgccggtaatgtgcgggagcgtcagaagaagcaccgccatcccccacgaatttgccataaggaaccagcgggaatccagtcttgccgacagccggccgagcagcggatgaatcaatgcgccgctcaagccgaacaagccgtatgagagaccgaattgcgtgtagctggaaccgatgtttttaataaataaaatataaaacggaaagatcaggctgccggcaaaaaagacactgctctgtgacaggatcagccattttaaatggttgtgtttcatgatttgtacctctgataaaaataattcataaacaagtcatccggatcatatttgtgttttttctgaaagaacatatcgcttttcggatatgcctcacgcatctgctctttcgtttgatacagcatatacgggagataataactgccgcggtggcgcaatgccgtatccgtcatttttctgacaatccgcgccgcactcgcctggctgtctgttgaaaacccttcattgattaaaagaacgagtgaaaacatgtcttcctttgcgtatgacagatcggctttttcatttttttgcacgtagcggatcgtaatatttacgaggttgagatcttcatgtgacagcgtcttgcgtaaatcatgaatgtacggcgcaaattcgccgacgggcacgaagtattcttgcagcacatcggtgttgtccgtgttttcatattccaaaaatttcgattctgaccgcatgacattgttcctggagactttcacaccgttttgtctgagaaaataagactgctgggttgaccagaaccaatttcttccccagtcataccggcgggagaggccgagcgcgaatttcgtcagcgccggatgctcatcttctttcagttcattgtgccgctttaattctttctgattgtctgagagtgtgtaatcagtcacatacatatcgtgcaaaaagcctttatcccctgttgcgatccgcgcgagatgcatgcgcacggcggggttgcgccgaacatgctgcgcaaaatattgactgtatgtatcagcgttcatgcgtttcgttttcatttcataaagctcatcatccgtcagctcaatatccgcgtccaggatgacgccgaacaggccgtagccgccgatgacggctgaaaacaggtcatctttcggagtaacggtgatgactttgccgtccgcctttaaaagatgaaacgatttgaccgtatcaatcagcgaaccgtaccggatatcccggccgtgggcgttggcgctcagtgagccgccgatcgtaaaaatgttttgcgattgcatgacttttaccgcgagcccgtacggattgacatagcgctgaatatcattccacgtcgctcccgcctgcaccctgatgatttttttctttcggtcgagaccgagtattttgttgtagcccgtcatgtcgagaacgataccgtcttcataatacgtctggccgcccattgagtgctgggcgcctgcgattgagatcttcaggtgctttctcttggcttccttaatcgtttcgaccaatgtttctttctcttttcctttgaccgtctgcttaattttcacgggcatgagacggctgacatccgtcattgtccctgcctgctgctccggctctttgtgaaaagcggaaacagcgaacagcgccgtataaacaaggatgctaaggataatgagaagtaattttttcttcatggattcctccctcgcatgcagccggtctattatatcatgcctcacgtccgtttttttcctttttaacccgatacaggaaaacaccgggtataaaaatccacagaaatccttaaaatgattttttagtcagtatataatcgatatatatgcagatgtattaccaaagggattgtttaaaacaaacatgttaaatgaggtggggaaaataaacataaaaggaatcaatcatcttcttttttctgtttcaaatttggaaaaatctatagaattttatgaaaaagtatttcatgcacagctcctggttaaaggacaaaagacagcatattttgatctgaacgggctttggcttgcacttaacttagaggcggatataccaagaaatgaaatacataaatcttatacgcatatggcctttacaattgacccaaaagattttgatgcaatacatcaaaggctaaaaaatctaaatgtaagtatattaaatgggcgtcctagggataagcaagatcaaaagtcaatttattttactgatcccgatggacataaatttgaattccacacaggtacactccaagacagactgtcctattacaaaaaagataaacctcatatgaaattttatatttaaaggtttgtttgcgatccaaaacaaaccctcactgtcgcttatccgcgttgattttttccttgtaaatgcagacaaaagaaaagcacctccaaactttaggatgtacctaaaatccgaggtgcattttcttattactgaatccctaatgcgatttttgcgtagcgtgacattttgtctcttgtccaaggcggattccagacgatgtggacctccgtctcttttacatccggaatgtcggcgagcgcttttttcacctcgtcgacgatgatcggagcgagcgggcaccccattgatgtcagtgtcatcgtaacgtgcgtcaggccgtcgtcatccatatcaacgtcgtatacaaggccgagattgacgatatcgacgccgagctcagggtcaacaacctgctccaaggcgcccatgatgttttcttttaatgcttcttccacgttccatcactcctttttcctcagtataacgtaaaagcggcttttgttaacacctttgtgctttataaatgcttatcgaaccaggcgacggtttctaaaacggcgtatctcgggactttatgatcagcccgttcgtctttcagaaactgaagatggtcgggccggctgctgtaatgaggtttaatcgtttcataaaagccgcgggtcggtgcatacggaacgactttgtcttgaacgccgtgccagaacagcagcgggcggctgcggagtttttccggttccagactgagatcgaacggtttgagccgcgcaaacagttcatcgacctgttcttttgtgacgtcaatgtcgatgtcctgcttttgaatgtggtcaatctgctgctgaaaaaatgccgtatagttcgggcttcccatcagactgacgccggctttgacccaatcatacgcggccatcgcgccgaatgtcgtaattccgcccattgacgtgcccgcaagaccgatccgcccgtcttcaatcagaccgcgcgcttcaaaatcctttttcagcacgtcaagctcctcgatttcatttaatacaatgtcccaaaaatggacggcgagctcttctgctgacagctgttcagcgcgttcaccgtggtaaagagcttccggcagcacggccctgaagcccttttcagcaagcaggtaagcgaaatgaagattatgctccttcgcgcttgtaaaaccgtgaataaagaaaacaaggggagcgggacggtcccgattttcttcttttacaatatgtaaaaacggaatgcctgatacggtttgatgatcaataagaatcacgttgactccctccttaggataaccataatcataagtgtaacatgtagacaataaagatggtaaaaagctacactgtacataagtgaaaaacagcaaattatatgacaaaaggagttatttatggagacaaaaccttatctcatcgccttagatctggatggaactttattaaaagacgataaaaccatttcccctgaaacggcacggacgattcagaagctgaaagaagcgggccatcatgtctgcatctcaaccgggcgcccgttccgttccagttcgatgtattatgacgagcttgggctgacaacgccgattgtcaattttaacggggcgtttgtccaccatccgaaagacgaatcatggggacgataccacacgtctttatcggtcgatgtggtcagacagcttgccgaacttacagagacctatcaaatacataatgtgctcgctgaggtcattgatgatgtgtacttccattatcatgatgagcatttaattgaggcgtttcatatgaatacggcgaatgtcacattcggcgatctgcgtgaaacggtcaaggaggatgtaacgtccgtattgattcatgcaaaggaagaggacgtcgcggatatacgcgcacatttatccgatgtgcacgccgaggtcattgaccacagaagatgggcggctccgtggcatgtgattgaaatcattaaacacgggatgaataaagcggtcggcctgaagaaaatcagcgactattaccaagtgccgagagaacggatcatcgcgttcggcgacgaagacaacgatcttgaaatgctccggtttgccgggtgcggcgtagcgatgggaaacggcacggatgaagtcaaacaggccgccgaccgcgtcacgggatcaaatgaagcggacggaatcgccgaatttttaaaatcctatttctccctgtgaggttttgccgctcataacacaaagccttccgcccatactaaaacagacgactcatctcgtctaaatatggaagggggacattgcaatgggtaaacgaaacaaatcaaaacggtttattcagcaaggcaaggactctgtcagtcttcatgacgcaagatttccatatcggtctacattagaggaagcacagcatgatgcagcaaaagattcggctgaaaggcaggttgacttttaatgagaaacgaactgttttctcaagccaagtcatttgtccagcaggccgtcatgattgctaacggtttcgaggacggcgatcaggaaaaagctgtctcacgcgccaaaaacgccgtgtcttccgcgtacgccaattcgacggatgcagaacgtcagcagctgcaccaatttcaggatcagctggagaaattgcaataaaaaaaggcgccccgtttagacgagggcgccgcttttttattttacttcaaatgtttttaccgttttcagtctttttccgatctgatcggacttccctaaaaacgtcaccgtcaccgtgtatgttcccggaccgggcacgttcttccacacatctgaaaagtcatacgtttcattcggcattaaggtcacggtctgaaacgcctgagtaaacattttgtcttttgaatagcggtacagttctttgtgatgttggtcatgtacggtcaattcgaatttctgccctgagctgaatgtgaaatcgatcgggctgccgctcttgttttttaaagacatttgaaattcgatctgctgatccgtctgcacagggtttacggctaattccgcttgctgttcattcatctctccggatacctcctcagcgggctccttctgcccggattgactgctgcatccgatcagtaaaatgaccggtaataacaggccaaacagccacttcattctatccgctcctatcagtcttttctgaagaaaccaaagatccccgtcgtttgcacgatgtttgtgaaggctttcgggtcgacttctttcacgattttctcaaggtcatacaattcgtaccgcgtgatgacgatgatcatcatttctttctgttcgtttgtgtaagcgccttttgccggcaccgtcgtaatgccgcggaccattttcccgtaaatcgcttctttgatttcatcggctttttttgtaacgatcatggcggtcagtttcatgtggcgggtgtgaatggcgtcaatcacccttgttgtgacatacagagcgacaagggtatataatgctttctcccatccttgcaataatcctgccgtcaaaatgataatcccgttcaaaatgaagaaatatgtgccgaccggcttatccttccatttggccagcaccatcgacacgatatcaagaccgcctgtcgaagcgccgaatttcagcgttaaaccgatgccgatagctgagatgactcctccgaatacggtattcagaagaatatcgtgcgacagtctcatttccgggagaattcccataaagacggacgtcagcgctacgcttaatatgctgtatacagtgaatgatctgccgactttcagccaccctaacacaccgatgggaatgtttaagaggaacatgagaactcctgtcgaaatataaaagggggcgtattgatcaacgacgcttgacagcagctgggcgacaccggtaaaaccgctggcatatacattcgccggtatcaggaataaattcagtcccgccgcatacagaaacgcgccgatgacgacgattgctaatttttttgcttgttctagtaccatggcttgctcctccgctcattttcattattagcttttcccttaaaataaagttttgaacactattttgccacatttatatgatatagttggcatcactctcaccaatcggaaagaagggaattatgatgacagttcaccttattgctgacagcgcctctgacctgccgaaatcttatattgaagaaaaccggatcgggttcattccgctgcacgtaacacttgacggaaacgaatatgaggacacggtcaccattcaggcggatcatatatttcaagcgatgcgggacgggaaagttccgaaaacatcccaggcatcaccggatacgataaaaaaagtatttttacaatacgcggaactgggagacccggcgatatacatcgccttttcctcaggtctttccggcacctatcagacggccgtaatgatcgccaatgaagtaaaagaggaatttcccgattttgatttacggattgtagattccaaatgcgcttcattgggctgcggcctcgcggtgatgcacgcgcaaacactctgtgttaacgggaatacaatacaagaaatcgaaacgtctgtaaagagcttttgcgcacggatgaaacatatatttacggtcgatgatgtcgcttatctcgcgcggggcggcagaatttcaaaaacgtccgcttttgtcggggggcttttgaacatcaaaccgattctgcatgtggatgacggcaggctcgtgccgctcgaaaaattgcgcggacagaagaaactgtttaaacggattatagacatgatgaaggaagaaggcggcgattgggcggatcaaaccgtggggatcagctatgcagataacgaggagacggcgcttcggatgaaggaaatgattgaagaagcgttccatccgaaagagaccattcttcattcaatcggctctgcgatcggcgcgcactccgggccgggcacgctcgcgatttttttcctgaagccataatttcaatgcgggcgggcatcctaacggacagaagggaggctttgccgcatgaaagatgatgacaaaaaaccgttggacaataacgccgtaaatcagaaaaagaaccggcttgccgaaaaaaaccggcaggcgggaaaaaaccagaattccaaaaaaccggaccatctgtaaaagcaaaacagccctcttgtggatgaagatagagggctgttttttgttctatatgcgtctaacatcacttatcacgaatccgctttcaggcaatgccggcattctggacaggctgaagctcaaatcttgggacggaacatcgtactctatttcattggcaagaaacgcaagggaagttttcatgacttccacggtcattccctcacccggacagcggtggccgttagccggatcacctccgccctggggaatgaaatcaaatttattttcctcccgcccctgaaaacgttccgggcgaaattcattcggattctcccaaagccgggaatcatggtttgtcccatataggtcaagcatgacggatgcaccttttttaaactcacagttcttccatacgaaatcttttttcacaacggctcctaaaaacggggcaaacgggtaataccgccgaacttcatgtacaaatctttcggcctcctgatcatctctcgatctcagtttaccccgatattcagggtaatcatgcaatgcaagagctgaaaacgtaatgaagtaagaaatggcggcaatcgggcgcagaacattaataagctcaacagcagccatgtgagaatcaagtctgttcccgtcaagttctgtatgaaaagccatttcatacaaggctgagccctccggcgtttgcagcttgccggaccgcacatcctcaatgacctcctctatccatttctccgttttcagcctcgcccttctgcctttccaatgacgcggtccgacagcgccgaatgcgtctaccatatcggtgaaatcctccgcccgctctttcacttctgagtctttcagcgggacgccggcccactcacaggcagcccggcacagcactttcttcgcttcatcaaaaaggacaattcggtttgaaccctcccacatttccgcagatgctttccactgttttgccaccgcttccgcaagccgtttttgccggggcggcgtcatcagcgacataaatagaagcttcctgtgcttatgccgttcaccgtccattgactggattgcccctgttccgaataacgttttctgcacccgtttggggagggcatgctcccgctgaaatcgttctgtgtcataaaaaagctttgcggcttccgctccgctcatacaaatgaatgtcttccctaataaacgggcgcgaaacacatccgagcgataattctccgctctgtttttcacaaatacatatccatcgcgtaataaagccagactattatcaagacccttatcatgcggaatttgttcattcatcccgattcctcccatcttttttcacctttcacgaaaaagaataaatataaacacaagtatattcagtatttgtgtttcattcagaagttactcatgtcaggctgcaaaaatcagggggcggggcataagcccgttacaaagtaaaccggcggacctgatcgtttaaccgctctgtcaggctcaccagattatcgacgctttccgccattttatgaaaagaagacagctgctcaagcgcggaggcagaaatttcttcgcttcccgcagccgtttcctgaacgacggcactgatgctttcggcatgatgcagcacttgctcaccaagctgtttcgattcgatgatccgtccgtccaattgagtaagctccgctttaatatgggcggctttttgttcaatatggacgaatgattctgacgttttctccatcagctcctgctgtctgtccgctaaagcgacgccggtcgtgacagctccggtaatagatgtgatgccgtcttcaatttgctttaccatatcgaaaatctgcgcggtcgctttggctgatccgtctgcgagcttccgtatctcctcggcaacgacggcaaatccttttccggcctcgcctgctctggccgcctcgattgcggcgtttaatgacagcagattggtctggcccgcaatgtcagaaacggtctgcgccatcatactgatgcctgccgcatgctctatgaagagatcggcggcttcggaaatctcttttgatgtctcattgcttttatcaatggcttgcttggtctcggctaaagcaccgcgccccgcagccaccgccgcaatcgtctcttcgctgcttctcgtcgtttgttttgaacgttcggcgttcgcctttgaatgttcatccatttgttcaatgaattgcaccgcatgctgcagatcttctgaaatggtttgggagccttgcgccatttcttccgtcgacacggatacctgctcggtcatgtccttcagcgtctggttttccttcgtcaaaccttccgcgaaagtctcgacttcacggccgacctctccgatcgcctgaattaaggtgcggagctgttcagccatcattccgaatgagtcattcagctctttcagttcgtccttccctttataatcaagcatttcaacagcaaggttccctcctgcaatacgacgggcattttcagccatgcggcggatcggccctgcaattctcttcgtcagcctgatggaagatatgacggtgacggcaagtatcacgatggtcagcacggctgcgctgtaaacgataaactgaatctggtcagccgtctgcttctgcatgtcttcatagtgatcccggcttttcagattcagcatataaatatcattcagaagaccgttgatgcgggccgccgtccttgtcgcttcagccgggcttttcgaatcaagagcagcgtccgcctccgcctgccatgattcgtattttttggcgagtttgtcataagcggctttgtctgcaccgtccgtcatcgtttttttgagcgccgccagtttgtctgagctgcttttcatatagcttcgcacatcttctttctgggcgtctgcgagcgtataggaatagccggtgatgctttcttttaacgtattaaggtcagcttttgcttcctgaacgtttaacagcgcgtccacttcatcttcatttgaagcctgaatcttcatcatgtttacgatggtaaagccgatgacggcggcgaagcaaatcatcgtaacggctgcgttaacgagcagccttgtccgtaatgtcacttcagatcgcctcctgtttcaatcagactgtttttcatatccgtgatctttttcgtcagcccgcctgcgtttttgacaactctgatcttagctaagtccatgccgttttccttcagtccgtaaacgatctcaccgcttttgatctccttgttgtcttttaaatctttcgccaattcatagatgacatggtcgacgtttttcactaaagaagagataacggcgtgctcggcggtgtaatattgatcgctgtcaacaccgatggcgtatactttttgcgcctccgcttctttcagtgcgccgacacccgtgaagccggccgccgtaaacaggacatcggctttttttcggatcatgttttgggcgatgcccttcccgagcttatcatcatcaaacgtaccgctgatgtccgacagcacgcggattctcggtttgactgattccgccccttgcagatagccttttttaaaccgtttaatgacgtcggcatctgaaccgccgataaatccgattgtgccggttttgctcgtcatggccgccagcgctccggctaagaagcttccttcatcctctttaaacgtgacggaggtgacattatccaggtctgatacggaatcaatcagcacaaaccgctgcttcggatattttttggcgaccttttctaaatccgcctgcatgctgtaaccgagccccaccacaagatcattgccttccctgacaagctgtgtcagtcctttttcgtatgtaccggtatcttttatttccctatagtcaaatgtgatgccgagctcgtctctcgctttcatcaaaccttgaaagcctgaatcattaaatgattggtcgccgaggccgttgtctgtcagcatgatgccgattgttttcgttttttcggccgccgtttcctcagatttgccggcacatcccgccgtgctgagcgcaatcagcagtacagccgcaaatatcgccatttttctcattgaaactctccttttgtttttttctatagttatatatcggttcggatgtcagaatattttatttcaataaaatatgtatgttcggcaggatgttaaacaaatgagggcataggagcttttgagaaaataaaaaacatcggttttggttcaccgatgtttttgcagaaaatttattgtttttcgtatgtccagccgtcttcctgatagaccttgccgtttttcatcagatgcccgagcgcccgcttaaaggcggctttgcttaaatgaaaccgttcgcggatatcgtcaggatggcttttgtctccgtaaggcatcgcgccgtttcttgatctcagataggtcagaatttcttccgcgtcaaccgaaagcgcatcctgctttctcggcagcagggacatgttgacggagccgtcttccttcacctcgatgacacgtcctgtcacgcggctgccgagtctcggctcttcttttctttctgaagggtgaataaacgcgcggatgccttcatcggtaatcagaaaagagcctgatgcaatcagtctgtacaccgtgcccgtcaggtctttattcatgacgtcttcccctgcatccgtaaataattcactgatgatatcctcaggcgccggcttggcaaacatgcgcccgcggcttgtcaccttcagcatgcaatacagtctgtctcctttttgcggccagacggatttgtacggaggcaggtgctccgttgcgacgagcgcgtcttttgacagaccgacgtcgacgaatacgcccatatcttccacagcgtccgtcacttccacccatccgtagtcataaaagctgatgagcggctttttcatcgtcgccgcgagtctttcctgatgatcgacgtaaataaatacgtccacttcatctctgtcttcgatatcctctgtgatttcactgttatgtaaaagaaccgtatcctcgccgtcggttaaaaaataaccgaaatcggtttggtgatctatactaagcgtgagctgctgccctggtctcatgttatcgtccttcctgattcgcccgtatgaggctgatgtttttctcattttttccaatatgcataaattcatgctttatgctgttggacatttctctttattctactataatcaactcataagtgaaatgttataggaggttttctcatggcaaaagaaagttcttttgatattgtatccaaagttgaatttcccgaagtgcagaatgcgattcagatgacgctgaaagaaatcggcacgcgctatgactttaaaggatcgaaaagcgatgtaactttagaaaaggaagaacttgtcctgatttctgatgacgagtttaaactgaatcagctcaaagatgtgctgagcggcaagctgatcaaacgggacgtgccgacgaaaaacattgaatacggcaaaatcgaaaatgcatcgggaggcacggtgcgccagcgcgcgaagcttgtacagggcattgataaagacagcgccaaaaaaatcaacgcggtgattaaaaactccggcttgaaggtcaagtcgcagattcaggacgaccaagtgcgcgtcaccggaaaaaataaagatgatctgcagcagattattgcagccgtccgcggagcagacctgccgattgacgttcaatttattaattttagataaattatgtgattcctattgattattgtctctattttcggtaaatttggagaaagggattttcacagttaagttttggaaacccatgacaattacatgaacgttcttatcaagagaagccgagggactggcccgacgacgcttcagcaaccggtgtagtggtttacccaaaccatgaccaaggtgctaaatccagcaagctaaaaacagcttggaagataagaagagagacaaatgattacaaagtcttcttcttaagaagactttttttatttctcttttttccttgctgaatgtgacgaaggaggcaaacaatgggactattacaagacttaaaagaacggattttaatcggagacggcgcgatgggcactctcctctattcctacggcattgacagatgttttgaggaactgaacgtatcaaagcccgaagagatcaagcggatacataaggcttacgtggaagccggggcagacatcatccagacaaatacgtacggcgcgaattttattaagctctcaagatacggacttgaggacgaaacgaaaaaaatcaatcaggaggcggtcagaatcgcgcgcgcttcctcagacggcgcttatgtattgggaacgatgggcggcatccgcacctttaacaaaaacgcctacagcctggaggagattaaacgcagctttcgggagcagctttatttattgctgcacgaagagccggacggtctgcttctggaaacatactatgatttagaagaggcgcgtgaagtgctgaagatcgcgagaaaagaaacggaacttccgattatgctgaacgtatccatgcacgaacagggcgtactgcaggacggaacgccgcttcgggaagccctcaggtccattgccgatctcggcgctgacataacgggaatcaattgccggctcggcccgtaccacatgattgaagcgctcaccgaagtgccgattttccgtgacgcttatttatcggtctatccgaacagcagccttccgtctttagaagaaggccggcttgtttatgatacggacgatgcctatttccgggagagcgccgtacagttccgcactcagggcgcgcgcattatcggcggctgctgcggtacgacgccaaaccatatcagagccatggctgaagcggtccaaggactttctcccgtcactgataaagaagtgaaaatcagacgggaagaagaagtcatctcagtccgcaacgaacggaccgagccgggtttaaacgaaatcgccgctcaaaaacggtcaattatcgtagagcttgatccgccgaaaaaattgaattttgacaaatttctgcaagcggcggctgaattaaaagaaaccggcatagaagcgctgacgctcgccgacaattcattggcgacaccgcggatcagcaatgccgcctgcggttcattgctgaaagagcgccttgatatccgttctctcgttcacattacatgcagagaccgcaacatcatcggccttcagtcacatttaatggggctggatacgctcgggctcaccgacattttagccatcacgggtgatccttcaaaaatcggcgactttccgggggctacctccgtctatgatttaacgtcctttgacttgatcaggctgattaaacaattcaacgagggcatttctttatcagggaaaccgctcggcaagaaaacgaacttttccgtagccggagcatttaatccgaatgtccgccatctcgataaagcagtaaaacggctggagaaaaaaatcgagtgcggagctgactacttcgtgtcccagcctgtctactcggagcagcagctcattgacattcatcatgaaacgaagcatctcaaaacaccggtgtatatcggaatcatgccgttaacgagcagccgcaacgcagagttcatccatcatgaaatcccgggcattaagctgtcagacagcatccgcgaaaaaatggcgctcgccggcgaagacaagcggaagcagaaagccgaaggcctcgccatcgccaagtcgcttctcgacacggcgtgcgaactgtttaacggaatttatttaatcaccccgtttctccgttctgatttgacgtcagagcttgcagcttatattaagcaaaaggatgaaaagcgggctgatgtatatttgcattgacgcggaagaggccgcctgatatgacaggcggctttttcatggtacgatacagaaaaagaatcaagcaaaggaggattttttcatggttgaagtaaaacccatcaccgcagaagacacatacgcgatcagacacagcgtgctgcgcccccatcagacgattgaggattgtaaatatgatcaggacagcgtcaaaggagcctttcatctcggaggtttttacgacgggacattgatcagcatcgcttctttctacccgcagaaccagcaggctttacaggcagcgcccgcctatcagctgcgcggcatggcgacgcttgaggaataccggacgcaaaaagcgggaagcacgttaatcgcctatgcagaacgaaaactggcagatatgggggcggcgcttgtctggtgcaacgccagatgtcacgtaaagggatattacgaaaagctcggctggaaaagcacgggcagcccctttgacatacccggcatcggcccgcatgtgatcatgtataaagaactcgcctgaaacagacaaatgcccttggggacatgtctctaagggcattaccttgaatgtcacgcctgcttttatatacggtactattgacgccctcccgcttttttaataccctttgtacattacacaacagcaaggatggcaggcagaacgatatctgtcaattgccgttttcagctattaattcagaaaaggaagtatgagatgaatacgatccaaaaaccgaaaatcccgaaagaattgccggtgctttctttcacagaagcgcttcaggacgacctcataaaagaagtcgtcatagaaaacgccgtggtaaacagcaaactggacggcctgcgcgccgaaaaagtcattttcagaaacaccgtttttacggatgtctctttcagacatatggaatgtacggatgtcctgtttgacaaatgtgatgtctcaaacgctgatttcagcggaagcatcatccatagaacggcgtttcagcattcaaaacttctcggcttgaatctggcggattccgccatgcgtcatgtacggtttgaagactgcctcgcaaattacagctccttcagctattccaatatgaagcatgtccggtttgacacgtgcgctcttacagaaagcgagtggaatgatgccgttcttgaatacacagatcttgacgcctgtgatttgaacggtgcaaacttcatcggcacgtctctttttaatatggatatcagcacgtgcacatttgatcatctgcacgtctcacttgagaagctgaaaggatgccgcatctctccggcgcatgccgttacattcgcagaagcgctcggagccattgtgacgtgatcttttattaaacgaaacggcgggcgatgtccgctatcgtttgaatgcctttttccaagtccggtaaggatgcgtatgaataggaaagacgcaggctttgccggtcttcgggaagatagagagctcccggattgatcagcacgccggcctccaaggcacgggtgaaaagcgtctgaacggcgattgcttgatgaaaagtgacccaaatataaaagcccccctccggcacacgccactccgcaatatctcccgcgtatctttcaagagaacgcaatgccgcatctcttctgattttgagttcctttctgagacgcaaaaggcgcgcttcatagcggccgcttgacagccattgacatgccgcccattgagataaagcactggagccgtaatccgtctgcattttaatatcggcgagcctgtctgcaaccggctcaggggcgacgacccatccgatgcgcagacccgggcttacggtttttgacagcgtgccgatatacagcacattcccctcaccgtccatggattttaacggaggcggcggttctttatcgatccataaatcaccgtatgcgtcatcttcaatgacaggcaggcggtgatttcttgcgaggacgatgagttccttcctccgcttgagtgacatcaccgttcctgtcggattatggaatgacggaatggtgtacagcagccctgcttcgtattgccgccggtaagcaggaagatgatccgttttgattccgctcccatccatcggcactcccttaagcctgacgcccgctgattgaaacacacgcagggaatggagatacgacgggttttcagtcagcatgacagagtttggttttagcagcccgattgaaatgagctgaagcgcctgcagcgcgcctgagacgattacgatggatgccggggacgcgtgaattccctttgttttcaaatgttccgcgacgctttgccgaagctgaaggctgcccttcggttcttcatagccgagcgcaaaaatgttagttcccgcttcacggaacagttcggccatctcctgctcaggcagcagctcttgactcagttcacccgtccccagcctgatcagatccggacgcggctcgttttgattaatggcctgaaccaaggctgaattcggctgatgacttcccgatgtaacgtatgtgctccaatcaaggggcttagccgctgccatgatgctccacgtattgttgacgacctttgtgcctccccctctttttccttccagaagaccttgggcgattaactcatcaactgctgccgtcactgtgcttcggttgacctgaagctcctcggcgagctttctttgtgagggaattttcgtgccgatggtccattcgccatgaagtattttttcttttatatgctgttcgatctggagataaagcggtatgtgcgactcccgatccggacgccagctgttcatacgtcatccctccttctttatttattatacatttggctggttcaagtaccagccaaatggccggagacatcagcacacagtgcggctacaatgagatttagttgacgattggagggttttacgaaatgaatgccattcttcacggagtgatgctcgctttcggccttattttgccattgggcgcgcaaaacgtgtttatttttcagcagggagcctggcaaaaacatgtgtggcaggcatttcccgcagtgattgccgccgcggtatgcgatacgattctcatcagcgcggccgtcgcaggcgtgtcaatgattattgcagagattcccgtttttcagaccgtcatgcttataggcggctttttgtttctcagttttttaggctggcagacttggagaagcaaaccgcaggccgaacaggcgaaaaaaacggttttctcggcaaaaaaacaggcggtcacggccgccatggtatcccttttgaacccgcatgcgattttggataccgtcagtgtcatcggcacaagctccgccgcctatccgggaattgataaatggctgtttgccggtgcttgtatcgcggtttcctgggtatggttcgccggactggcgttcgcgggacggctcgttcaaacggcggatacaggaggccggctcctcggcatcctgaataaatgctcggcattggtgatgtggggtgctgctttttattttgcggcgcttttgtttcgataaaaggaattcggccaggccatgttgaatgtaccggaagaagagggggaattggaatgtcagacattttaaagctgtatcactaccacagatgggcaaatgagcaagttattcagcatctgaagacgctgcccgcggtcagcttacagcagaaactgaaaagtgtttttccgactgtgaacgccgtgcttgtgcatatataccgggctgattacatttggcttcacgtgctttacggagaaactttcgaacaaatcgtctcgcagtttgatcaatttgaaaagcttgacggagattttgaggcggttgaacatagaatgactgaactggacaaagaattcagcgaatttttaaaagaaatggagaacccggaaggcccgatctctatttctcatccgcgcctggggacgcttcagacgacatatgccgatgtgatccggcatgttgtgaatcacggcacataccatcgcggcaatatcaccgcgatgcttcaccaaatgggctataaaggcgtgccgactgactacatttttttctcatacgaatcataaaaaagcaaaggcctcccgggcctttgctttttcacttcgaatctatcataatccggcatagccggagacgcccgctttttcggccacatcgtaaattgtcattttcatgcttactgatccctcttttgttctctggtattaggtcagtccgttttccggcttacgaatttgcggtattcaagcggcgaaatgccttcaatctgtttaaacagtttggaaaaataggtcgggtcctccataccgatggcgtccgcgattgcccccattttgtcattggttgcggacaaaagacgtttcgcctccgtcattctgactttgttcgtatactggccgggcgtgacgccgagcacctgctgcatacagcgggtcacgtagtcttggttgtaatgaagagccgaagagagcgctttgatggttgttttctcctgatagtgctcctgcaggtaccgggcggcctcccatgcgactctttcctttgcggacgggatttggaacgcttctttctgaagatggagcagcagctcttcaaacagaatctgctttctgagcggcagatcggagttctcggcgctgtcatcggtcagcacactgaattgcccggccataaactgcgggcgtctcaccttccctttttgcggcagggacaggcggtagcgggacggttcttcaaagctccctttttttcgcctcagctccgaccaattgttcccggttgtttccgtcacctcataagccgctccctcaaaatgaagccacgaataggatgtcgtttcttcactgccttttgtcccgtaatgttcaaggccgggagaaagcagaatatattctcccgcttcaacggaaaaggcgttttcgtcttctgtaatgtagaggacgccttctttcacatacagcagatcaaacaccgggaagacccgtctcacatgggtttcgccttttttgaatactccttctcccgcagcgataaagaccgggaacggaggaactgtgaactcgagaaaggacatattttcggccctcctttttaagtcggatttttgcaagaagtttcgtttctctccctttttattataagaaaatggaggtacacttttaaacgttgattttttcaggaaaggggttaaaagaaatgaaacaagcgattttaaaacgggctgcgttcaaacaatcctctgatcacaaactctcattatacgcgctgacttggccgatatttattgaggtttcattatatatgtttatgggaaacgccgacactcttatgcttagccaatactctgacaacagtgtggcggccgtgggtgtcagcaatcagattttaaatttaattatcgtgatgttcagctttatcgcaacgggtacgacaattgtgatttcacagtttttaggatctaaacagaaaaaagaggcgcaggaagtggcttatgtatcaataggagcgaactttgtcatcagtctcgccatcagcgccgccatattttttgcggccgttccgctgcttcatgtgatgggtctttccaatgaattgatgccggatgccaaagtctttttgcaggtggtcggcgggctgtccttcattcaggctttgattatgacgttcagcgccattttaaaaagctacggtcatacgaaggatacgatgttcgttacgatcgggatgaatattttaaatattgccggaaactttcttgtcattttcgggccgctcggccttccggtgttaggcgtcgccggtgttgcgatgtcaacgtccttcgcgcggatcatcgggctgattgcgatgattgtgatcgtcaaaaaacgcatcggactcggtctgacatggcaaaagatttttcacgtccataaagagcacttgcgaaaactcctgaaaatcgggattccgtctgccggcgaacagctgtcttacaacatttcgcaaatggttgtcacttattttatcgccattatgggcgctcaggcacttacaacaaaggtttatacacaaaacatcaccatgtttatcctgctgttcggaacggcgatcagccagggcacacagattttgatcggcagatatatcggcgccaaacggtttgatgacgcttatgaccgctgcatgaaaagtctgtactgggcgcttggcattgccgctttgacatccgtgatcatgaccttgttttcaaagcagctgatcggaattttcacaagcagccctgacataattgcgacggcgagcatgctgatcgccatgacgatcattcttgagcccggccgttcatttaatgtcattatcatcaactcgctgcgggctgccggagatgcaaaatttcccgtctacatggcgatgatttccatgtggggtatcggtctgccgctcgcttatctgttcggcatccatttcggattagggcttatgggcatctggatttcatttatcgcggatgaatgggtcagaggcattcttatgtacagaagatggcggtcgcggatttggattcaaaaagggattgcataaacgcccgaagcttcgttatgaagccgggcgtttttttatgcttgtgaaagccgttgtctcatgtcaccgagctctgatcggtaatgtgccagcaaaccggtaacggcgggccttgagtataacggaaacagctccagctcttcagacgcctcctcgaaatacgcctcggcctcgaatgcgatgtactcccatacattcataaaagctttgttgacggtatggctctccagctcttcttccgtatagccgaattgcttcatcacctggcgcgggagacgctttttcgcccgctcgtccgtatggacctccagaagcacccgggtcagctgaatggctgctcctaatgaaacggctgcatggcggagtttctcttggttccggcgcgcacaaaccggcagcagcagcaggccgagggctccgcctgtttggcccgcatacatcagcaggtcatcaaactcttgatacgttactttttctctgtcagagatttggccggcgataaactcacgtaacggctcttcttcaagcgcaaattgctgccgcacatcggtgagcgcctcccacaaaaagccgtcggcgcgtgacccgttcagaaagtcttgtgccgcctgttcaaatcctccaagttcctgcacatcaagccggtcagcttcgtgaaacaaagcaagcaccgcccatgcggcccgcctgttttttggcggcagggatgagaaagtccatttatataaaggaaagtgcgcctcggcaagctgggcgcatgtttcgtattcggtcatggtatcactcctctgttttttagtgtaccatatgtttcacaataaaaagaccgatatccttcagcggaaaccggtcgcggcactgttattcttctatatcgatacggtacgcctcaaaccatgtatggatctgggcaagatgggcgatcagctgcgggcctttcatcagctggccgaaccacggaacctgaaaagatgaaccttctgtctccagcagcatttccagcttctttctgtcaagcagggtgtgaagcacggaatctttctgttgtaaaatcgttttcagccattctgtgaccccctgcgtgtatttcgggtgatgcgttttcggataaggactttttttgcggtacaaaatatcttcaggaagcagtccttcaagcgctttccgcaagatacctttttcccggctgccatgcattttcatttcccaaggaatattccaaacgtattccacaagtctgtggtcggcgaacggcacccgtacttcaagacttgcgcccatgctcatgcgatctttgcggtcgagcagatttgtcataaaccaaagcatatttaagtagaacagctgccgtctcgctttatctgttcccgtctcaccatctaacagcggcgtttccgcaatggtttcttcatatctcgcattcacgtattctctaagattcagccgtttttgccacttttcatccaagagcgtgaccctctcctcagtcgacctcatccaaggaaatccctcttcttctgccgctgtgtgaaaccacggatatccgccgaaaatttcgtccgcacattctccggaaaggctcacgacaaaatcttttttaatttcccggcagaaccataatagcgatgaatcaacatcagccatgcccggcaggtctctgacgagaacggattcctccagatgttcaatcagctgatcctgcgtaatcacgcacttatgatgctgtgtgccgaatgcatttgtcattttatcgatccacgggccgtcatcattcggctgaaaggcgctcgctttaaaaaatttgctgttctcctcataatcaattgaataagtatgaaggggatctctgccttgtttctcaaaatgagccgcggctatcgcggttatcgcgctcgaatcaagcccccctgataaaaacgtgcaaaccggcacgtcagatacgagctggcgtgtcactgcatcctgaaataagtaccgaatgtgagctgcggtttcatcgaagctgtctgtatgcttttcgctctttacattccaataacgccatatggacaaaccgtcctttgagaaagtgaacgcatgggcgggacgcacctcgtgaattcctttaaacaccccgcagcccggagttctggacggcccgagtccgaatacttccgcaagtccgccgctgtctgtgcgggctttcacatcaggatgagcaaggatggctttcaattccgacccaaacagaaaggaagagccgtgttctttataaaaaaacggtttgacgccgagccggtctcttgccccgaacagccgcttgcgcttttcatcccagatggcaaaagcgaaaataccgttcaagcggtccacgcactcctcccgccactcaatatagctgtgcagcagcacttctgtatcagaggtcctctcaaaacggtggcccctcgcctgaagctccttccgcaattcctccgtgttatacagctcgccattataaatgatggtgtacgtttcctcttgatgcgtgcaggccatcggctggcggccgccttcaatgtcaacgaccgaaagtcttttatgtccgaataaaacatggggctctccccagacgtttgaatcatcaggccctcgttttgaaagagtgtctatcatattgttcataatatgtttctcttggacgagctgcttttgaaaatcgacccaacccgcaattccacacatgtgatatcagctccaatcccgtttctgtcggtatcaaattcgtttctatcagcactttacccagtttatgcaaagaaacgcagatagttgatttgtcccactaagagttgtatgagacaagcccgatttggaaagaacggaagagaagaaacaaacaaaggagaccggcacggttatgaaacgaaaacagcttttctcagaaaaaaacaaatgggggcgcggcaccctgatgatagaggacggcatctgcctcatcgaaaacgatgaaggcgatatcctgcttgcagacagtctaggaaacgcagacgtattgatgaaacgcgacggcagatggcagccggcacggatttgcggcggcgcggccgaaatcggtgcagacaccatccccctgctcggcggggaagaaatccgttatgaaaaggcggtcaaacggccgctgttaaccttgctcgattcgctggacgatgaaacgttcctgctgtttctcagccatctgcacgggttcggcctgtctgtatatgattgcgtattttcctacaatcaggcgctgttttccggtgaaggcgtttcgttttatcacttctcggcggatgacgcacaatgcgccctgcagcatcaccgcggcagctcgggtaaacacgacagatttgaatggacggcatctgacgggcggcgctccattatgtattcagcggcaagacaagacggcaccgcgtaacaaacaggcggcaccttttaaataggtgcctcctgatgtatttagctttgtttttcacgctgattgacgcccggcgtttgctttgacccttcacagccgtagcttttgcggtagcaagagtgattgacgcttttggcatcctgcaaatctccttcgcctcatcaacatccccctgtcacggcatttctcattcagcggcacagttgcgcagaatgtatgcgcaactaaaaaaacccggatgcatccgggtttttcaagcgattgattaaaatacgtgaaagccgatcggcaagtgaaggccgagcagcactgtcaggacgagcacgataataaaaccgatccacagtccgccggttgatttgccttttttcttgcggatgacgagcatttccatcagtccgatggtaatgatgccgagcagcatttttccggcgtactctccgttccaattcgcaaaacggacaaaaagctcagctccggtcagaataataataatgtagaataagcgcagaatcatatgcgtaatttttgcgcccttcgcttttccggaaccgtacagcccgtagctgacaaacaccaggataagcgcaacgacccatgaagtaatatgccaatgtgtcattatgttcaattccccctatcagatcaatctgcctcacttatggtaccacaacaagccgatcggagcattatcaatcgtgcgaaagacacacaattatccgatttggttcgacagcgtgccgatcggttcaattgtaatgtcaatgcggtcccccggctttaaaaatttcggcggcttaaacccttttccgacaccggacggcgtccccgtcgctataatgtcaccggcttcaagcgtcatcccttttgacagcgtttcgattaattcagctatcggaaaaatcatgtcacccgttgatcctgattggcgcagttctccgttcacccgcgtttcaactttcaggctttgcggatcactgacggccgacttatgtacaatgaccgggcccatcgggcatgtcgtatcgaggcttttgccgataaaaaactgtttatgtttcttctgcaaatcgcgcgctgttatatcgtttacaattgtatagccgaatatatgatcaagcgcatgttctttcgagatgtgcgatccgcttttagatatgattaccgcaagctccccttcataatcaagctgctccgttacgtccaagtggctgtccactgtttctccgtgtcctgtaacggcagcgggggctttcgtaaaaaccatgggatgctccggtatatccgcctcactccccatttcaacggcatgatcacgataatttttcccgatgcagatcacgttctttgaaggtctcggaataggcgcgcaaagctttacgtcagacagcgcatacataaatgaacccgactcgtcattcggttttttcgcccattccgcaagctgtccggcatgcgcgacaaacttatctcctttttgaatgcactcgatcagcgaacccggaatcgtctcaagttcaaacaattttttttcagccttttgcagatctaagattttgtcatcatcaatgatcagaccgacaaattttcggctgttcagttcccctgtcgcaaatttcatgttaatcccccatcatttttaaatctggcattcctttatgtattcttcctccgggcgggaaattcctcttttaaacaggctgaaaataagtgtaaaagagtatcaaaaattgtcacttttttagtcatattgacgaaataaaaccttcttggccaaaatgggttatactattatcatcctatgttttccaaaataatcgagaattggagatcacacgatgaacaaaattgaagaaaaaagattaactttattcgagacagcgcaaaaattcggaatcaatgcgacggagaccatcaggtgcagccaggagctggacagccttttaaacgggtgccggggcgggctcatccaacaaacgaaagacagcgggctgaacccggccgcacagattgagcacggccgcaccgcaggaaaaaaagaggctttctcataaacgtgatatgtatataaatctgtatcatttatgtataagacccggcatgcgtaaagcgccggtgtttttacgtctaaagttttttccgctcacaaaaatgtgcatttgtcataagctattttaggcaggcagcccagataagctcctggagtgcagtcatgaaaatcttcacgaaaaggatgtgctcgtatgcccgcaattgtcggagcgtttaaaattaatgccgtcggtacgagcggagtcgttcatataggcgactgcatcaccatttctccaaaagcagaggttaagacatttgccggagcgggcagcttcaataccggagacaatctcacactgacgaattacaggaattcaacgaatgtgtacgataatgatgtaatcgatcagccgatggcaggaaacgcataaaggaggcgccgtatgaatttttacgtcaatcagtcgatccatatcaattacatgcgtgtagaatctgtcagcaattcctccatactgcaaatcggaagcgccggttcaattaaatctctttccaatctgtacaacacagggagttatgttgagccggcgccgcctgtcaccgcggggcagcagactgtaacaacaggggggggtcccggcacctcatcatttgtaccgctccagccgccaagccggtagttttaatgaaggaaacgagacgcgaggtgaatgtcatgtatgatcaatccgtttcatcctacctgcagaatttaaattctttcgtccagcagcaggcgcagcagattcaggagctcgaacggcagatgaaagaattccaaaatgaaatttcaacgctgaagcagcagccttctacaagaatcgatcggctcgagtataaatttgatcagctgaaaattgaacggctggaaggaacgctgaatatcggattgaatccgactgatccgaatgccgtgcaaaacttcgaagtcggccagacatctccgcaggtcggaatgatgcagcaggaacaggcgggccagcaaatgcagcaaatccgccaaaacgtcgatatgtacttgaatgaagaaatccccgcgcttttagaacagctcgaaactcagtatgagagcaggctggacgaaacgaacaaatatcatattattgaagatatcagaaagcagatggacagccggattcagtattatctgtcccatgtcccgaaagaagaaaatacggcgcccgcgcaatatgccgagcagattgccgaacatgtgaagcgtgatattgtcagggccgtcgagcactttattaagcacatacctggtgaaatgaaaggtgatgatccgtcatgatttttacagtgattaaccggaatattgaagtcggcgacatccggtctaccggtgtgtccagttcttccttattattaatcggcgacaccgattccgtctatctgtcttccatctttgacacgcctccggaatctcttattatcgggccttatgtgccgctggcgccggaataatgttaaagcgcatttcacgcctccggaacgccaaaatcaattcagtcgggattgcgagtgtttttcaagcaggcgatacgaatgaaatcaatatgcggatcaaagtattggccgatcagcgtagtcttgctgtatacagagatgatgaaggctcatttaacaaaaaagaataccagatttttcggcagccggccgtcatgccgttaccggaaacgggagtccaaagcgcattctgccatgaaaacccttcaattcgggtaaggaatgtgaaagttcaaggggtatcgtcagcgtccgtggttcaaatcggatcgacgtcgatcgttctgggagattcgcggctgaaacatattaggcagatcttcacgccaagctcacaatcacagcagccctgacatataatgacggtgagacttctataaagggtgtcgtttatgccagcaattaccggacctatagctatcaattccatatcgggcggagtcgtaaactttggtgattccttttacctttctccaaaaagctcttctaaatctgcgctcggttcgggagcaggcaataccggagatttcctgttattaaacaacgttgtcaatgcgacaaactatatagaccccgatgtcagcgatcaaaatgtggtcggaaacgcctaaaaagcagccgctctttcagaagagggctgcttttggttcagcgttattttcgttcatttgctttttttgtttttacaagcttttccggcggctgttttctgatccatttcacaaaccgcgcgagtttcgggtcacgacgcagctcttctattcccgtgagccttgccgcaagctcctgattcgtatagagcgcgtgaacctgtttatgacaagggatgcagagcattgcggtcggaaggaatgtcccgccttcttccttaggcgttaagtggtgctccgtcagccgcacatgatggcggccgcataattcacatgtgccctcggcagaatcggccatgattccttctcctttctacatgatctccaatgtgacccgggtgcctttcccgcccggttcggacggatgaacgattaattttttcggcagacgcgctctcagctcctgcacatggctgatcactccgacggataagttgtccgattgcagcttttcgagcgctgtgacaacggtgtctaagagcccttggtcaagagtcccaaatccttcatctaagaaaaagaattgcagcgggtattgcccccgcagctgaatctgggcggacaaggcaagcgcaagcgacagcgatgtcagaaacgtctctccgccggaaaggcttgatacgggccgtttgacgcctccgttcgcgtcatcacgcatgacgaaaccgccttctgaatcgactaatatggcataccgctgccttgtcaaagctccgagacgggcagaggcgtctcgagccacgctttccagctgttcttccgctaaaaattcgacgaatgtattgcctttacatacagactggagcttatcaagcctgtcaatctgtgtctgccagcttttcagttcggcttcaatctctttaaagcgcttatgctgtttttgcataaccgcgaaggcttttgcctgtgctcctttttcctccatggcggcgcctgactcagcctctgcctgcttcagcagagaaacggatgctgtccattcttcctccgatatccggcgctcggctaatttatcagtaacacggctgatatttgccgatagctgttttgaggtgtccaagaactcatctatttcttttttcatttcctctgcacgcccttgcggaagcagactttttttgacttggtccgggtcggcaaacccggtgtcttttgacctcacgcgccagtcgttttgcgctttctcaagggaggtctcagcatccctgagtgacatgagactcccggattcccggccttttgcgtcattcagtgattgctgcgcctgcttcagcgcgtcgaatagggactgttctttggattttaacagctgtaattcctgccgcaccgcttcaagctttgcggaaattgatgtttcttcggctgctgttccgagctcttgttcatatccgtcaatcacctgctgcaggcgctcagacgcatagtgaagctcgagccgttcccgttcaagccgatgcttcatctcctgcaggcgttctttctcctcttcatgttccttgaggaatgcgatgcttgtttcaatgcgcttctcacattcttctgcctgcctgtccttctcatctatcgaagcctgccaggcgtcaatccggtttggcggaatatcaccgcagacttcattgtactgattcaatcggctttctgacagcgattcaagctcttctaatgaatgtctgagacggtcggcttctttttcctcgtagcggattcgttcggcaagctgctcagcttgtttcaccgtctgctgatgcgcgctgatcagtcttgtgaccttctcttttaccgacagcatatcctgtttcatttgtttccattccaagcggacggcgctgaacgcttcatcaagcgggcgtccgctgatggaggaagcggcttccagctccggaacccggacgctttgcagaaacggacattcttcggtaaaacgccccgactgttcttctaatgcaaccttggctgtcagcacttcctgagaaagagccgccgcctcagaaagcagcgcttcaacctgctgcagctgttcctgtacagccgtatcaggcgagaatgtttcatgagcggaacgcgggcggtcatgctgcgtcgagccgcatacaggacaaggctttccttcgattagtttttccgataattcttttgttaatgcagccgttctcgcttcctctgagcgcctgcggagatcggcttgcgttttgtcagcccgttcggctgcggctttcagtgaacgttccgtttcacagaccatatggtaaacggtttgaagcgtttgataagcgtgcgtaatatcttcctcttccgttttcgctttcgctgtgagcgactcgctttctccgttcagcttctccacgtttttcagctgcgttgtcagattggcccgttctttcgtgatttgttcctgtatctgctgaaagcctgccgccagctgtgcggcggtctggcattttttccgttcatcggcggtcacttgaactgctttcagctcttctttcagctcattctgcctgttttggccgcgggtcaggcggtctttcactgcggccagctgtttcgaggcggcttcgtattcttcctcttttttgctgtgttccgcatttgttttttccgcttcttttttcgcttcaaacagtttttgttcaatggctgaaagtctttgatacagctcttcttccttgacaagcttcggctcctgttcggccttatgggcccgccatgcttcataggcttcattttgccgggtaaatgaaacggtttccgcctctgatttccgtttggccagttcgtgttcccgttcggcgcgctgcttccggcggacggcttctgtgtaacggtctgcgtacggctcaagggcgagagctgtttccgcctctttaagacgctcagtcaaatccgtgatgtacgggcgtctttcctcaagctttttctcccggcgctcatattcatctctttctgtctgcaggttccaaatttcctggtgattctcaaagcgctcttttgcccggacccgtttcttctcagcttcttcaagccgttcgttcgcttcgtgaaactgctgttcagcctgcttcagcgcatcttctcctgcgtctccgaggccggattgttcggccagcatttcattttttttcgctgccgcttcctgcgcccgccgccgcaattttttgacaagcctgtccccgtactgttccagattaaacaggcgctggagcatatgtcttctttccgcgcctttaagcgacagaaactcggcaaactttccttgcggcagcacgacggctcttgtaaagtcgtcaatggtcaggccaagaagctcttccacctttttgttcacttcattcgctttatcggccagcaccgtttgttcgtctttgatttcaatcaagcggcagagggcggtttttactttcgtttcatccgttctcttaaaaacgcgctcgaccttgtaggaaacccggtggccggattgaagcgcgaatgtaaatgagacggcgagctgctcttcggcatgattcaggatgccgtgcgtattatttgcggcgcgctccacttttccgtataaagcgagtgtcatggcatcaaggatcgacgattttccgcttccggtcggcccgaaaatcccgaacaccccggctcctgacagtccggcaaaatcaatggtctgttcctccctgaagctgtggagcccttttatcgttaacagaatcggcttcatgtcgcatcctcctcatcatctgctgacgcaagctctaaaaacagcttgaccatctcctcatccggcacgccgccgcccgtttgtttttcataaaacttcttaaatcgatcctcaattgatgtgtgtttcacttcaatccggtcattgtcggtctctttttcttcaaaaaccggcctgatatggataaagccgggatgcgcctttctcagccgatgaatttcctcgagagaaagctgatccgtcaaatggatatcaagatcgatccaggcattccggtcacgcccttcatcaagccagccgtgaacctcgctcagcccctgcgctttccatttgacgagcggtttaccggaagacaggaaaatctcttcccacttcgcttctccgccgggcttcgcttctaccaccgtcaccgatttggcataaccggcttctgaaaagctgtatgccagcggagagcctgaataacgggcagccgtcttggcgcgcttgatcgtttgcggacggtggagatggccgagagccacgtaagccgcatcagccggcaggctgtcagcggcaactgtgtaagcgcccccgacttcaatcggacgctctgaatcagtctgatttccccccgcgacataaatgtggctcgccgcgattttcacggcatcgttccggcacagtccgcacatgtgagcaaacgcctctctgattttcacatcgtaatgatcgcgaagaagcttttcctcaaacgtatcagaaagcacttcgtttaatctcgcctctgacggatatgccagcgcggctacggctaacagctcgtccgtcgacggcacctcaatatgcacgggttctgtccgcggatagccgattaaatgaatgccgcgctcatttgttaacggagaagccgccgccagcctgtcgggattgtcatggtttccggcaatgacgacaaccgggcgctttccgccgtcagaaagcgcggaaagactttcgtaatacaattgttcagcgagcgcaggcgggttgaccgtatcaaatacatcccccgccataatgaccgcatcaatattttcttccttgacaatggtattcagctcttccaatacctcggcctgctcgctcagccggcttctgccttccagcgttttgccgaggtgccagtcagctgtatgtaaaatgcgcataccgcattcacctcactttttgatagaaaaaaagatccgctccaaaaaggagcttcggatcttgttacagtgtaagaacgtgacctccatcgaagaaatagagcgcacgccctttcactttcgtttttgtaatttgttcaaccgcttttgtatacaattcgatttgtgtttcataccttttttgcagaatcggagccgcgccttcaaatccgttccggaatttcccctctatccgatcagttttatagtccagcaaatagagaccgtccgcagtttcatagaggcagtcaataatcccctgcacgagcagcggttcaccggccgtttcggcatccttgtacacctcgccggccggaagcgccatactgaacggcacttcccggtcaatccgcagcgccccgagaaggtctttcccgatttcagttccgaaaaactggacaatttcttctatatcaatagcttcctgctgttcttctgtcagcagctctttttcgtaaagcatccggaccgtccgctccgcttcttcggcagtcggaacgtgcgtcagcggtatgtgctgcatcaccgtatgcatcgccgtccctttttcggcggctgtcagcccttttttcatcataaaaccgggacgcctgtataaaagcgtgtctcctgacggtttgatgagagagcggccgctgtattcatcctcgtattcttgctttctcttcagctcagaaactgactgcttcgttctgatagccgtcagctctcggtacggatattcccattcaagcagacggcgcgcctgatcatcaaatgaaaacgaatcaggaatcggctcgccctgctgaatcgctttgagacgtttgctcttttcttcagcacgttcttttggattctcttccagcaattcactttgctgcagcatccggatgtgaaaacgcgacgggtcgcgcgcgatatcctcagatgaggaaagtcccggcgtcctgtgcgcctccatgtcacggtggcggatgagcgccggcccgataaagtccaaataagatgacgcctgatagcggtcgaattcagaaagaagccaatcggcccggtctgcttgcgcctgccatttggccagctgtttttcccggtttttgcaggaaccgacgagaaacagcttttccttcgctctggtcagcgccacatacaatacgcgcaattcttcggataagagctctctgcgcatctttttcttcatcgccacaagcggaagagtcggatagctgattctgagttccggatggatatacttcgtgccgaaaccgagctctttatcaagcaggtatgatttgttgagatccatcatattaaaacttctgccgagtccggcggtgaaaacgacggggaattcaagtcctttgctgctgtggatcgtcatcagccgaacgacatcctcctgctcgctgagcgcccgggccgtccccagatcatcgccgcgctcctgcatccgttcaatgaaccgcaaaaagcggaataacccgcggaacgccgtcgcttcgtacgagcgcgcccggtcatacaagacgcgcagattggcctggcgctgctttccgccgggcatgccgcctgcatagtcaaaatatccggtatcgcggtatacttcccaaatcagctcagacaccgaatgattcgtcgaaaatgaccgccacttttgcagactgtcataaaaggttctcagtttttgatacagttcatcatgtctgtcagcgttcgctatatatgctttcagcgcttcataaaacggcgcttttttcttttcaaggcgtatcagcgcaagttcattttcgtcacatccgacgatgggcgagcgcagcacggaagcaagcggaatatcctgatacggattatcaatcaccttcaagactgaaagcgccgcagccacctccacggcttcaaagtaacccgacgtcaaattggcgtacaccggaatgccctggtttttcagctcttccattaattgcggcgcccacggcatggagcgcagcaaaattacgatatcccggtactggatattccggtgtgtttttgttttgccgtcatataccttaaacggagatgagacaagctttcggatctccccggctatcgctttcgcttcccagtgcacggtttcaaagtcttcggcatcctcggagctgtctgcgccatcagcgctgtcaatgagcagcagttccgtttttgccgcgtcattcggcggatacgatgcgccgagcttcaatgccgcctgttcatcgtagtccacttcgccgatttttccgcccatcagctgcttaaacaagaaattcgtactgtccaaaatatcggagcggctgcggaaattttggttcaggtcaattttctgccccgcgcctgccccgctttctgtaaaccttttatatttcccgagaaacagcagcggctcagcaagtctgaaacggtagatcgattgtttgacgtcgcctaccataaacagatttcccgcctcttcattcccgcttttaacaagctgcaggatagattcctgcacaagattggtatcttgatattcatcaaccagaacttcatgaaactggtcttgataataaacggccgcttcgctcggcacccgccggccttcttcatcaaccgcagttaaaatcgccaggcagtaatgttccaaatctgagaaatcaataattgatttttcttgtttcgccgcttcaaatcgttttccgtacgatatcacgagctgaacgagcgtttcgatgacaggcttcatatctgctaaactctttaagtgatcttgcggacttcttgtaaaataatcggtctttaccttttcgatcagtttcttcgcgccgtttcgcaaatcggtcgcttcgtccaaaagcgctttgtcaaattcatcaccctttaccgccttcgcccgcttaaatgagactgcgggaacccgttcatacagcgcatcgaagtcatgccggcagctgatcagctcttctatctgctgaaggtcatccagaaaattatcagcgcgcggggccggcccgccgggcgcttttgtcagttcaagcgccttctcaagcttttgttttgccccgaagagcgccatttcagcatcttctttcacatactggtaaaacggaagctcttccattttgctttcttccgtcacgtcatacaggcggacaaagctttgcagccatacttccgggtcaggatgcgaccgggaatactcgtacacccgtttgacaaggtcttgaagatccagatcatgcctgtctgtcgtatatctgtccgcaagctcaaaaaacgcctgattcccttttgcgtattcatcttcaaacagctcatcaagcacttcgtctccgagcaattcgccttccgtctggtcagccatccgaaaaccggggtcaagatcaatcatataataatattttttaagcacttgcagacagaaagagtgaagcgtcgaaatgctcgcccgatttaagagagagagctgccgtctgatatgcagagatcccggatttttggcgagctctttttctaatgcttccgcgatccgatgcttcatctccgctgctgaggcgtttgtaaaggtcaccacaaggagcctgtcaacatcaatcggatcttcttccgcggttatctttctgatcatccgttccacgagcacggccgttttacctgatccggctgcggcagcgaccagaatatcgcggccggaagaaacgatggagctccattggtcatccgtccatatgctgtctttcggtttaggaatttgcatcatcatccgcctccttcttcagccaatccagtatggtgccgtctttttccgctttcaggctgcggtattcattttccttaagcgactcatcaaactggcacaccgattgaaacgcacagtacgtacaaggcgtcttatctttcagcttatacggggtaatggacacaagcccgtccgttatcgcttcgcccgcctgttcaaatgtccgccgcacatggtctgtcagcagatgaaaatcccgttcgctgaccgcggctgagtcggatcttaaagaaccgtcctttttcaaaccggcattgacgatatttgaacgcccttcctccaaagtcgtgtccatcaggctgatcgcctcccggtcaccgaggagaaggcctttcattttaaatttcttaaaaatttcctgctcgatttcatcaagccccatcggcagactggcctgaatcatcggatcatgaatatggaaatacaaaacgcctgccggggtcgctttcataccgagccaatcttcggaatgtgtaatcgataagtcaagatatgtgagcatttgcagagcgagcccgtaatacacctcagccagatcaagccccctgtcgcttgatttataatcaacgattctcagcagcaggccttttgaactttccgctttatccacgcggtcgatccgtccgacgagttccatcgtacagccgtttttcagcgtgaaagtgagcggaggcagcggcccgcttccgccgaaaccgagttcaagaccgaccgggacgaaaccgctcgccttcgcatgctcgcttaatatgcctgaaacacgcgtgacgatcttctgcagtttttccttcacataaaagtgtctgtttgagctgagcagaatctctttttgcagctttggcgcaagccgttccaccgcttcataggagaaattccggcactgatctttcgtcagatcgcgccattccagcttctgctcacgaagccggtctgaaatcagcttcaggctggagtgaaacagctggccgatatccggcgcgtccagcttgaaaaactgccgctcttttaattgaagcccgtgagatgcaaaatgagagaactggcaggcattaaacgcctccatccgggagacgcttcctttaatatgctcgccgtaaagctggcgcgaaacaggccgttctagacgcttcgcctcattgcggaaaaacaagcttgaaaacagctttttcgcacgccggtgatcaggctctttcatcagcacattgtatgcgctccaccatacgtcactgatctcgtactctcttgtccacagcctgagctgacttgccgtatatgtctgagccacctgtttattgacgagatactgaagctgctcttcttcgcttacctgctcgggatcagccgctgacagcttttcctgatgatcgggaaacagctcgccaagcctgtttacaacgattgacggcaggagcgtttttccttccgcatcggcaatcgggtatgacacataaagacggtcagacggactcgacagcgccatatagatgagaaaatgctcatcaagcagccgctcacgccccgcggaagacagctccactccgactgctttcagccactccctgtcatcatcagacagcacgccgttttcatccgggcgcgccggaagaacgccgtcattggcaccgatgacgaatgtgcaggacgtgccgtacattcttgagagatccatattccctacaaatacttggtcaagcgcgggaggaattaaagaaaaatgaagcgattccgttcccgtttcaagcatttgctggaacagcgccaaagatatttcatcttcacccatcatgccggtaaactcctcgagaagctggataacggcatcccacgcctggccgtgctgctgcgcttcgatcatgtttccggcctcttcggcccgctgccttttccggtccagcttcaggggaacatcggtatcttccaaaaagagataaagagcctccgccatgctttgaaccgttttcgcttttttcatccggttctgaagccggacaaggggtgcagctatccactctctcgtctcattcagcatgtgttccatctctatttcctgatccgtctgcgcgaaatcctcatcgagcgatacgaagcgcctgtatacaaaccgctcgccgttcgtccagcgctcccctttaatgccgtaggcgatacagtaattttcaagctgatcaacctgctctcttattttctgctccggctgatcaagcgggaataacagttcggttttcgcacagcggaacaccgcttcatatctccagttccccttcacgacatccaggcttgaacggatgaattcaataagcgggtgatgctgcatagaagcttttccgtcaataaaataaggaagcccgtaatcggcaaacacttccttcagcaaatctttataatcttccggctgacggatgagaatcgccatatctttgtaccggtatcctccatcccggacaagtgattgaatttcccggacaataccttcaagctcagctcttctgttttgcgcctgcatgacggtaaaagcttcctgtccgccggtatacgccgcggcgggacgcacatcgtactgcgactctatacaggcaagctccggcgcatactgatgccgcttcgtgccatgcagttccttgcaggaaatatcggcattcaattcctttgccgtctgataaagcttatagtatgtgcttcccgtcattctgaacagatcgagctcatccggtgcctgttccgccgaagggctgtccgccgtcagcgagaatgtgacatgttcagcatgcatgatcagctgctccagcacccttaattcctgcggcgtaaattgatagaatccgtcgacgtaaacacgggcgccttttacaacgtccgccaaaggaatctgctgagcgagcagcgtcaaataatcctctgaatgcaaatagtgtccggcgaggcttctttccatctgctgatataaaatgcctaaatcatgaagtttttcagacagcatccgctctccgcgatattctgacgccgttccgctttccgccatgcggcggacgtcttcaggctcaatacagtaccgcttaaactctgtcagcatccgttccacctgctcagtgaatccggttttgtcactcgctttttgatacactttaaactcgtgcttatattcttcaatcagtttccttaaaagcatctgcacacccgtcgtcgtcacaaacgggcggttcatgcccccggtatgctgaagcacgcgccacgccaaacgcgaaaaactgaacacttgagcgcgtatcatgccgccgatatccggcgttttagcaagctcatattccattaaaaacgtcatttgatccgggactagaaaaatgatcggtttcccgaacggctcccggcgcagttcatcttgaatgctgtcgataatcagcctcgttttcccactccccgatctgcctactaaaaactcaacacccaaattaaaagacccctctctttttatctttctacattttatcgaaagttgacgaaaatgaccaatctcatctgctggtaaaaacgggatgactgttttaaaaaatatcgtttttgaccaaaataaagaaaaaaggactaatgatgatgtcagaatatcccgaagtaattgtacggacggctctgtcgttcagcattctgtttatcggcgcccggatactcggtaaacaaaccatttcacagatgacgctttttgatttcattgcggccatctcgctcggcgccatcacggcaaatctgtcgtttaatacaaagctgccgattcattatcatgtcattgcctacattattttcgtggcaatcatttaccttgtcgcatatctttctatgaaaaacagggcccttaggggtttctttgcaggcaaaccgaccattatcattcaaaacggtaaaatacttgagcataatatgaaaacgatgcgttataccatcgactacttgaaccagcagctgcgtgtaaatgacgtatttgacatttctcaggttcagactgccatcattgaaacaaacggcagcatgtcagtggaggtcaaaccggaatttgcgcccgttacaagaaaggatctcggcatctttgccggacatgaaaagaactttgccgttgagctgattatggacggccggctggtgatgaagaatctggaagaaaaccacgtatcggaaaaatggctgagagaagaattggacaagagaaacctcaaaccggaagacgtcgtatacgctgtgcgcggaagcaacggccggctttttgtcgacacatacgacgaccatattacatcgccgctagatcaagaataaaaatgacatccgcacatgtcacgggctgccgccgtataataccctataaacatccgggggtgagtccaatgcacgagaatttttttcattatacagccatctgcagtgacgattctgtgcttatcaaggatctggtaaaatccataaacggtgaatacagcgctgtgatttgctactcaatattagccgaaaaagcgccgaccgcagaaatcagaagacgaatcgaacatatcagagaggaagaagtgcgccacctgcacgctttctcttcactgtatacgtcaattaccggaaaacagttgatgccgaaacagacggagcattgtccgcacacatacagagaaggactgagggcggcgttttatgatgagcagaaaacgaatgatttttatttgcaggcatccgatagagcggtgcatccggaagcgaagcggttatttgcccgcacagcatttgacgagcagcgtcatgccgtctggtttttatacgatatggcccactctccttcccaccatacagggggaacggtatcaaacgcgccgaacacaagctacaccgaggtgaataccggcaaataacggttcaggcagatcacgctcccccgccgggagtcttcagaccgctgacaaaccccgttctttcaacatgagagaatggggtttacttttcgagccgttttatactccctctaaacaatggataccttcttcattgtataatcagcaaaaaccctttataataaaataaaccaactggtcggtttttaaggagccgaacctcatttggcggaaaggatctgtgtgaagtgacaaatacaaaaggcggtgccggaaagagcgaaaagacgaagaacaggctcgtatccgcttcgcgtgacttatttgcaaaaaaaggatattcagaaacatcgattcgggagattttagaggcggccgaaatcagtaaaggcaatctatatcaccattttaaaggaaaagagtttctgtttcttcatatcatggaagaggatcaccgtgtgatgatcgagacgtggagggaaatggaagctgatctgaaagatgctgccgaaaaattgacgggctttgcggagctgctcagccggatgagcatcaattacccgcttatgagagcaagtgaagagttttatgcgagtgcgtttacgtcagaggaggtcgtaaagcggctcaacaaaattgatattgaatatgacgatgtgatgagagagatcttagaagagggaaatcaagacggcagctggtccattcatcatgtcgaatcaaaagtaaaaatcctgctatccgtcttctacggtttagatgtgttatataaaaacgataccattcagcaaagaatcgaattgcaaaaagaagccatctccgtgtttattcacgggtcgatcagcgctgataaacagaatgacagctgacaaaggagaaacaacatgcaaaaaccgatcagagaacaaaaggctgtactcatcatcttattaagcaacatatttattgcgtttttaggcatcggattgatcattcccgttatgccgctgtttatgaatgtgatgcacttgacgggcagcacaatgggataccttgtcgctgccttcgccgttgcgcaattaattgcatcccccattgcggggagatgggttgaccgcttcggcagaaaaatcatgattctcgccggactgtttttgttcgcattatccgaactgaccttcggattgggcacacatgtctccattttatatttcgcaagggtgctggggggcatcagtgccgcttttatcatgcccgctgttacagcgtatgtcgcagatattacgacggtgcaggaaagatcgaaggcgatgggctatgtatctgccgccatcagcacagggtttatcatcgggcccggcataggaggatttattgccgatcacggcgttcgtatgccgtttttctttgcggcgggaattgcatttatcgcagtgatttcctctgtctttatgctgaaagagccgttaactaaagaagaacgcgcaaagcagctggaaagcgtcaaagaatcaaccttcttaaaagatttgaaaaagtcgattcatccaaactacttgatcgcctttatcatcgtttttgttttggcattcggactgtcggcgtacgaaacggtattcagcttatttacaaaccataaattcggcttcacgccaaaggatatcgccattattattacgttcagctccattgtggcggtcctcattcaagtactcgcgttcggaagacttgtcaacttcctcggggagaaaaaagtcattcagctttgtctgatcatcggcgctgtgctggctttcgtttctacggtgatgtcaggatttttgcccgtgctcgctgtcacctgcatcattttccttgcgtttgatttactgcgcccggcactgactacttatttatcgaaaatcgcaggaaatcagcaggggtttgttgccggtatgaactcaacatacacgagtttgggcaccattttcggcccggctctgggcggtattttatttgatatgaatattcacttcccgtttctgttcgcaggtgtggttttatttctcggtctgggattgacctttgtgtggaaaggaaaagcgggcgaggtttcggagtagggtgcactcacccatctccggagctttttttgcgtttgcgataagaaaaatgaatggattatgagaaataattcattatttatttatctcaaaatctatactatagtaatagtaaggttaacgagcttaacaatttaatatgaatgtttcaggaagaagggttttcattgaagaaagacaaacatctccttacggatatctggtttattctcatcagtgcggcaggggggtttcttctttcgcttacagggatgtcgatcgcctggatgctcggaacgctggccgccggctgcatcctctccatgacgaggccccgctggctgttcatggcgcctgacagaagagggattcaccgcagatggcttgcagcgggtcaaatgatcctcggcatcgaactcggccagaaactgaacctgtccgttctgtcggttttacgggagcattggcttccggtaggcttcatgctgattttctctatcgtgatggcgcttgtttccggatatgtgctctttcggttcagccggacggacatgatgacaagctttgtaggcacggcgccgggcggtttatccgccatgcccggtatcgcccaggaagtcggcgcaaacaccgcgattgtaagccttattcagctgacgcgcgtccttttggtcgtcatgacaataccgtttctcgtcattttcttatttaccaaacaaaacggtgcggctcagtcatcagccggagccgtttcggcaggcgcttcacatccgggccttattcccgtcttgttaacggccggatttattttggctgcctggcttgcaagcaaaggcgcaaaacggctgaaatttcccgccccttggctgctcggcagcatgatcggcgttgctgctgcggaaatcggcgtgtccgccttggcgggcaaagacatgctggcctggtggccgccggaagcgaaccagctgtcacaaatttttctcggcgccacaatcggatcaaaaatgtacaaaagcatgttcaccggcgtgacgagagtgctgaccgtcggatttatttcttccgtcggattaatcgccgccatgattctgagcgcggttgcggtttctaaattaacgggcatctccatgattacatctgttctcgccttttctcccggcgggatcgccgagatggcggcgacttcgatcaccctgcacgaagactcgactttcgtcgtcgcggttcaggtcatccggatcgttctcgtcatcgccatgcttccgcccttctatcggctgctgcaccacctttctcagctgaaacgggcacacggtgaaagaggccgggcagaaagaggaacatgagccgaataaaaaaacacgcatccatatgcgtgttttttatttgaacagctctccgccgccatttacagaccgccagtttgctgaaagatcacggaacagccgttcagcaaataacagttcttcatctgtatagcggtctaaaaatgccaagagccgcttttttatcaattcatgatattcatgatgaagggaatgcagctctttcccggcaggagtcagccggaaatagacttcttttttattgtcgctcagccgggtcctgcgcagaaagccggcttccaaaaacttcgcgcagctcctcgacacggtcggctttgtcgtcttcattttttccgctattgacgtgacattgatcggttcatgatctccgatacacgacaaaatgtgaatttccgtcaaggtcagctgtaatttttttccgttttcttcacggagttcgtccatccgtccggccaacgacgccctgatgtcctcctgacacctctcctgctcgtgaaaaatatctgtcagcccttcaagaatcatgtgttttgcatggtctggctgtcttctgtccaactgctgaatcacccttccgtattgattgtttcttttactataacgttttgttacacaagaaacaatcacacaggcgcataaaagggtatcagatgaatccccatctctccaaaccggtcagaacagcttcttccgcttcacgtcccgagccgccggctgcccatgccgcgtggccgtccggccggattaaaacggtgtggacgtcatcccaatcggcacgtgtttcagcaagctccgcactgacagctgccacgctgtccgtatcaataccggcgggaatgctccctcttaatgacaaaagcacaaaggcgcccttatgaagaaaatcatacagccgggccggccgcccgtcatgaagggtcaattcgatatccggcaggcgttttccgttcagggtatgcggcggcagctccgcatccggttcataatgcagatcaagcgcggatacttttcccgccaataaacggttggactcctgaaaatccagcaaagcggtcatcgtttctcttaatgccatccccgactcggtaaaatccatgagctttatctgggtttttatattgtgcaatacttcttttcctgtgctgtgcctttcctgatgatagctgtccagaagatgaggcgccgctttccccttcatttgcgccgccagcttccagccgaggttgaaggcatcctgaagccccgtgttcagcccttggccgcctgcgggaaaatgaatgtgcgccgcatcaccggccacaaaaacccggccggagcggtactgctcagcctgacgctcggcattgccgaaccgcgacatccataccggatcactcaatccgaaatcagtgccgcatatccgccgcaggtcttctttcagctcattttcggtgaccggctcttccttccgcttttgcggagcgtgcggagaaacgatgaggacgcggaaaagtccgtccgtaagagggacaatcacaaccgatccctccaggcggcacgttgaaaaaaaggaagattcgggcggatgtgtcaaagcggcatcacagagggttcctgttaagtcggcatcagtgcccgaaaaagcgatgcccgcctgtttcctgacaatgctccccgctccgtctgtacccgcggcatataagctgtgaagagtgcggataccgctttcgtcccggaacaccgtctccactccgtcatccgtctgggtgacagccaccgcttccgccccgcggatgatgtctgcgccgagacttgatgcatactcctccaaaatccgctccgtttctgcctgaggcagcattaacgaataattctgcttcgtatccagccgagaaaaatccagccgtgtatccagcatggaaaaatggccggaagacaccttcgtccctttttccaaaaagcgttccaatatgcctctcatggcaaaaagctcaagtgtgcgcggatgcatgataagcgctttggaatatggcaccgtcttcttcaatcgttcaataacagtcgttttcactccggccagcgccagttctgatgcaagcataagcccgaccggacctcccccgataatggcagcctgtgttttcatctcatcagccctctttcatattttttgttacgcacgtaacaaaattaccaaaaaataaaacgcctcctttttgtttcgcgcgtaacaattttcattatagtcttccctctgcttttttacaatcatttccgaaaaaaaagacgccgtttacttggcgtctgattcactgatgactccgacaatgtctttatccttaatcggaccgaaatgacggctgtcgaggctgtatatgcggttgtcgccaataacaaagtattgtcccttcggtatgcttttgcgcccggtcgtttccttcagcgtataatcaccggtcacatggctcccagcggacaatgatgactttaagggttttaaaaacggttccgccacccgttttccattcacatacagctgatcctccctgtatgcgattgactcgccggggagcccgatgacacgtttgatcagcactttgcggtgcgggcctttgaacaggacaatatcgaaacggcggatcgttttgtaacgatgggaaaacttgttgaccatcagctcatttccttgtttaaaggtcggattcatgctgattccttcgactttataatcaataaaaatggcattctttaattgtatggccaacacaacgataagcacgccggctataaaccaaaatcgttttttcaagattcctgtctccctccgtctttctcatgctgactgattctcatctgtaaacgccgttcgatatgctttccgacataccacagcaccgcgatcaccattatggcgcccgccatcctgaaaggctgtgtcatgagtgcgtgaagatcatacccgataaagctgatcataaagatcatgaccattttccccatagcggctgctgatataaactgcagcgcccccacccgtgacaggccggcaacgatatgaaccgcagcggacggcgtaaaggggaagcaaagcaaaataaacagcggaccgaaaccgtgccgctcaacccagagcatcatccgccttatggtctgatgcctgcggatgaaaccgaaagctcttttctgtccgaaacggcggacggcataaaacatcagcatcgatcctgccgcagacccgagccatgacagaaaaaaaccttcccacaaaccaaatgcattcgtattcgccaccacaaatacaacgagcggcaaaaacggaagaaacgcttcaataaaaggcagtgcagccgcagccgccgggccgaaagctctatagctttggaaccattccgtcagctgttcctcagtcaaatatgataaaaattgctccaacgtttatactccttaacgagtttgtctatccttattctacacattatctccaaaaaacgaaaatgtttacgagattttccgacttgaaatatcgtgtaagcgagtataaaataagaacaaacgttctcttttttaagaaagaaggagtatttatgcctgacatccggagcagcacccgcgatctcatcgaaaaagggctgtttctgcccatggcggctgccatcctgaaccgggacctcgaagcgcttgattcgtgcccgttcaaattaaaacaaccctataaacagcttatcagctgctctttaaaattagcacaaaaggatttgagtgatgttcgaaaagagttaagaaagcgtaaaattaaaatatacgaagcggaaagagacgaagcatttacgctttatatatgcaccattaacggctatgaagaaaaacaccgttatttcaacccgagaatacgggaacaggtaaccgccttattagaatattacctgtctcttgcgaccatttaaaaagcagccgggactgcttttccttttcaactgataaatttcagactattcacactatacattcgacatgattttctttataatcgggacacgctgttttcaatgaaaaggaggaatgttatgaaactgattcatgttctcgccgccctgccctttttcggaattctcgccggcattccatttgccaaccgggtgacgccttatgttttcggaatgcctttcattctcgcgtatgtcgtcatctgggcggtgctgacttccgttctgatggccgccgtttacaaattggacaaagaaaacaaggcgggtgaggcggaatgaacgcagcatttcccgtaatggccgccgtgctcctgttttgtgtatatctcggaatccgggcccgaaaaggaaaacatatggaccttgaacaatggacggtgggcggacgcggcttcggcacgatgtttgtctttttattaatggcgggagaaatatacacgacctttacattcctcggcggaagcgggtgggcttacggaaaaggaggccccgccttttatattatcgcgtacggctgccttgcctacattttgtcatattggcttctgccagccgtgtggacttacgccaaacaacacaaactgatgtcgcaatcagatttttttatttcaaaatacaacagcccgctcctcggcattctcgtatcgctcgtcggcatcgcatccctcatcccctatctcgtcctgcagctgaaagggctcggattaattgtttcagcaacgtcatacggacagattccgccctcagccgctgtctggatcggcgctgtctccatcacgatttatgtgatgatatcaggaatccacggttcagcgtggatatcagtcgttaaagatatcatgattttaggcatcgtcctgtatttaggcatttatctgcccattcattactatggcggatttacggagatgttcaaacaaattgacgccgcaaaacccggttttctcacgctgccggaaaccggacagagcgtttcctggttcagctcaacggttttgctgaccgccctcggcttttatatgtggccccatacatttgccgcttcctattcggcggagcatcctcgggtgtttcggaaaaacgcaatcatcatgcctctttatcagctcgtcctgctgtttgtcatctttaccggatttgcggcgattctgcaggtgcccgatttaaaagggacggacacggatctcgcgttattaaagctgtctgtgaaaacctttgatccctggtttgtcggactgatcggatcggcgggcattctgacggcgcttgtacccggttcaatgatattaatggcctcaagcacgctgttcgccaaaaatgtgtacaaagccattctgcccggcacgactgacgaaaaagtctcacggctcgcaaaatacgccgtacccgtcatcgcgctgatatccgtatattttacgctgaaaggcggaaataccatcgtcaccttgcttttaatgggctacagccttgtcacccagcttttccccgccctcttattcagcctgccgaagcggcgtttcatcacaagccacggcgcttttgccggcataacggccggggtcggaacggtggccttcattacgctgaccgaatcaaccatcggaaccctctttccgtttcttccgcagatcgttaaggatatgaatacaggcatcatcgcactggttctgaacattgccgtcatgtttgcagtcagcgccgcagtcagaaaaaaacaaatcagcgcagccgaaaaggcggcttaaatggtaagatagcggtaagatacacgaaaggggaaaaacgcatgatcatgacaacgaccgaaaccgtcgccggaaaacagattacggaagtgaaaggcttggtgacaagcagtatcgtccagtccagacacatcggcaaagacttgcttgcaggcttaaaatctgtcgtcggcggcgaattgaaaagctatactgaaatgctggaagactccaaaaaagcggtgaaagagcggctgatcagagaggcggagcagctcggagcgaacgccatcgtcggcctgcggttcgaactgaccgcaggacagaacacatccgaattaatcggatacggaaccgccgtcaccgccgaatccatttaaaaaaacaagcctctttaaagaggcttgtttttttatttctcacatgcgatatagtctttatctcggtcaagtcttttatttgcattgtaaagcgcttttgatacatacggcttgtactttgttctgccgcccttgtttttcactttcgacgatttggccacgccgcccttatacaccttattcagcgccttgcagttttgatacgttttcacctttgttttcgcttctgccgtctgccccgctccgtatgaacatccgaacacaagaccgaaagacaaaagcacagctgccgtctttttcatttctatcctatcccctctcctgagttatgcggtattgctgaacatatcatagttcaaataatatccatttacaagataaataggaaaatagttttaatttacgtccgcccgtatatcttttatggaatttttcccaaaaccttttataatatgaattgatagcgcgatctgactatgatgataggaggagaaatgatgatgaaaaaagggctttttgcgggtgtgctcactacagccgttctattcggcacatgtacggcggaaattccgggggtgatcagccccaatacggcggaagcggcgtcccagctcagcaaaggaatcggcggaagggcctacctgaacagcacgggctcagttctcgtcacgaaaattcagcttccaagctcaattcaggtgtcaaatgggacagcctatatttactcaggatttaccggaggcacagaggctgatatcggacttcagtacagtgacacctatcatgtatggaaaccgatcatgaaagtcggttcaaagggacaaggccaggtcaagtatctggaaggagaaagccaattcacctatacgaaaggcttccggcccggcagcaccgtacagctgaccatctacaaaaatctgaacggcaatacccgcgccacatactggggcacaaataatgacggatacaccggccgcattatctcagaactcgcccaaaccaatgtaggctctgtctcaaaatggaaagcgctcgccaccgtcgcggtcacatcagaggatcagcgcccttacatcaaatcaaacttctcaacagcctttacgaacatcacgatcgacaataaagcagtcacacctgtgattgatacacaggattttgccaaattgacagtgtcaggcagcagcgtcagcatgtctgtcatcaaataaagaattttgaacgcacgatttctgtcatcgtgcgtttcgttatgtcaatactgccgccgggtgaaaaattggaaacgaggcggattttcatgtacactttatgtaaaccacaaaaatgattgacgttcagtcattattcatacaggagcgaaatttatgaacagagaaaaaaggcttgaattaaagaaagtcaaaccgaaacatttgcagcaatttaatcagctgctccgatatgttttccaagtcacgaacagtaatctgcatgaagtgggatggaaggaacccgaaatcgcctccgcaaaactccccgttttggaacaagcgcatgtattgggctggtttgacaaagacaaactcgtttcacaggcggccgtttatccatttcaagtccggatttttaataaaacgttcgaaatgggcggtgtgacgggggtcggaacatatcccgagtacgccaatatgggattaatggcgaaactgttatacaaagcattagttgacatgcgtgagcgcggtcagtccgtatcctatttgttcccctactccatcccttactacagaagaaaaggctgggaaattatcagcgataaaatgacgtttgaggtgaaagactttcagctcccgaaaatgagcaccgtttccggtgaagtggaacgcgtcgagccggaacatgaggtcattaaagaagtatacagccgattcgcgcataaaagccatgcggccatgatcagaaatgaactggcatgggatgaatattggcgctgggatttagaagagcttacggctgccgtgtattatgaccaatccagacaggcgaacggttatgttctttactggattgcagatgaagtttttcatattaaagaaatggtatatgtaaatgaagaagcgcgaagaggcctgtggaactttatttcggctcatttctccatggtgacaaaagtcgtcggcgacaattattctaatgaaccgatcgcctttctgttagaagatgctgaaattgaggaaacgatttctccttactttatggcccggattgtcgatattgagcaatttatcaatcagtatccctttaaaccgcaaaaagagaagcggacatggtcttttacactggaagatccgctgcttgaatggaatcagggcgtctttacagcggagatttcgcctgaaggaaaagccgttttaagcccgggcggcgatgctgatgcggcgaaactggatattcagacgatgacggcattattatttgcataccggaaaccagaataccttcaccgcacgggccggctcgaatgcagcccggacacattggaattcattgaggatttgctggaaacgcaaaccccttatttctcggattacttttaataaaaaaacagccctcctcagggttgtttttttaacattcctttcattatttccgccaaaatgctgagcagtccgccttatcctgaatattaaattgaatcatgcgttcaagcagctcataatgcaccggttcagtccattgaattctgaataagcgggaagtagcgctgtagccggcgcgggcaatgtcgccggcaaaatgcgtaatacccgcttcttcgggggaaacacttacatgatgcttcgctgccgcaaagccgataacaaaggtgccgtgatcggtaaacatcggcgtgttccacttgatctgcgcttctaagttcggaaattggtcagccgtccacgacaggatttcctccattcgcagacgatgatcaggactgtcgatacttgataaatagtctttgaaaacgtccatgtcttcctccatcaacatcacgtccgctagcgccaaaaacccggattttcagctttttccttgatgttaaattcgatgatcttcttaagcagatcatagtgcaccggatcagtccatcgaattcggaacaggcgcgaagaagcgctgtacccggcttgagcgatgtcatcggcaaaatgctccatcgtctctttttcaggtaaaatgctcaaatgattttttgccgcggcaaacataatgatataggtgccgtgatcggtaaatgtcggtttgttccacttgatctgcgcttctaagttcggaaattggccagccgtccacgacaaaatttcctctgctttgagacggtgatccgggttatcgattcctgatacatattttgcaaacacatccatgcccatctctcctaaaatgaaatatcattactctttacatcatcatagccaacagacggacacgatacaactctggccgggcatgtaaatcgaaaaaagccctccccaaaaggagagggcccgtcccttcacatcacagctttctctaatatctctcccccagctcccgcaaaataaagtcgtagatcattcttgtccgctcttctttcggatacagcatgaattcctgccgcttcgggatatgactgcccatcctgtcctgaaaagtggttctgagataggcggttctgtaaacctgattttcaaaagaatgataggatacttccagttccatcgttttgccgtttgagaacgtgacagctgtgtcatcaaatgccgtcggttgaaaatctttaacgtgcacatgagatatccagccgcattgaggccttgcagaagaaagtgtagggaataaaaagatgtgatttgaagggtccaccataatcggcggcttgtgagaaattttaatcgcttcatatgttcccgcttttctcccggcatagctggagccaaagtagcggcagcttctgtcgatgatgtgaatcggcttcatgctgacatacagaatgcagtctttttcaatgaccttcgaccccattttaccgtctatttcctcaggcaaaacagcgatggttgaacgatttacttcgtagctttctaagggtgcgtgtgttttctggcacataatgtgcagcctccaatccttttcttgaaaatttatactaataatctatcatctgtcattggaaaacgacaggttttttttgaatatagctaaaaatcaccttttaaagatgtaatttagtcttaaattactatttaaatattgtttttctttttcgtttcacctcatttatacgatgatcattttcgttttttcgtcaatttgcaggatatgtcgatatatttccaagtattagttgtctaaagattataaaaattaattgatttttccggtcgttatccatatactataaaaaaggcattggggggattctttatgaaagagaaaaagtcgtacactgagctcatgaagtcccgcaacacgcaaaaagcaaacgaattcgatgtgacaatggccgatatttacattcaaatggtgcttgatgaatccttgtataaacgccggctcgccatgctgaccatgcagattaataaggcgcttgatgataaaaataaagaagcgttcctcacgctttcaaaagaatatgccgcactcaaacagagtgaataagccaatccatatggattggcttttttagattatccgtttacgatggttccgccgttcacatgaatcgtctggcccgtgacatatgaggaatcatcgcttgctaagtacaaatagcttggcgccacttcaacaggctcgccggggcgctgcatcggcacgtctgagccgaagacttccacttccttcgccgagaagctcgccgggatcagcggcgtccagatcggccccggcgccactgcgtttaccctgatgccctgagtgacaagagattgggaaagagatcttgtaaacgtgacgatcgccccttttgtcgctgaatagtcaatcaatgttttgtggcctttataggcggtaatagaggccgtattaatgattgaacttccttttttcaggtgagggagcgcggctttcgttaagtaaaacattgaaaaaatattcgtctgaaacgttctgatgagctggtggctcgtgattttctcaatccccggctgcacgtgctgctcacctgcgttgttgaccaggatgtcaatggaaggaaaggcttggcccgcctggcggatgacatcgttgcaaaaggcttcgtcgccgacatcccctgcgatcagcagacacttcgccccctctttttctacatattgcttcgtctcttcggcatcctgatgctcgtcaaagtaaacgatgaccacattagcgccttccttcgcgaataaaacggatacggcgcggccgatcccgctgtctccgcccgtgatgatcgccgttttcccttcaagttttttcgccgctttcggtttgtcaaaaacggggcgcgggtccattacatattcaaagcccggctgccggttttgatgctgcggcggcaaggttttcttcttctgattagccattttgatcactcctttacattaattactatattatgagtaatttgagcatcttatacgaatttcatgtatgaacagagtcttattggaaaaattaagaatatacaacagaggaggtaaatctgaattgactactttttcaaacgacgaaccggcttcctattggaaagcaacagctgacattccttcctttcccgccctcactgaagatacggaatgcgatattgcgattatcggcggaggaattacgggtctgacaacggcatacgaactgacgaaaagaggtttccgtgtcgctgtcattgaagcagaccggattttaaatgggacgaccgcgggaacgaccgcaaaaatcaccgcccagcatgatttcatctatgccgatcttattcagcagatcggcctgaccagcgcaaggctgtatttcgaagcccatctccgcgccatggaagacatgaagcagatcatcagagacctttcgattgactgcagactgattgaacaagacgcatatctttacacgaatacagaatcaggcgtcaaaaaaatgcgcagtgagcaggaagcttataccaagctcggtattgaacacgagcttgtgaaagaacttcccgtccccgttgattgcaggctcggtctcgccatgaagaatcaggcgcaattccatccgcttttatatggtgcggcgctcgtcaaagagatcgttaaaaacggggcgcggatttttgaacagacggctgcgatcgacataaaaaaagaaccgcagccggaagtggtcacgaaaaacagacacggcatcaagtgcagctatattgtctgctcttcccactttcctttttatgacggaggcgggctttacgccgccagaatgtatgccagcagatcctacgtactcgcggtaaaaccgaaacaagcgtatccggacgggatgtatctcagcatagacaagccgtccagatcactgcgatacaccgatttgaacggtgaaaaactggttcttgtcggcggcgaaagccacaaaacaggccagggaaaagaaatgtccgagcattacgaagcgctgaaacaatttgcggaagacacaatcggggttgaaagcatcccatatcattggtctgcacaagaccttgtcaccattgacaaaattccgttcatcggtcccatctcaggagatgaagaacatattttggcggcgaccggttttaaaaaatggggcatgacaagctcagcgctcgccgcgaagcttttggctgatcatattcaaaacaaaaagaacccgttttccggcctgtttattccgtcacgcttccacgcagatccgggactgaaaaaactgatttcctataatgccgacgtggccaaacaccttatctcgggcaaacttgagaggccggacgcttcacctgagactcttcggcccggggagggaaaaatcgtaacggtaaacggcaaacgggccggcgcctataaagatgaaaaaggctgtctgcatcttgtcgatacgacatgcacccatttgggctgtgaagtcgaatggaatgacggcgaacggacgtgggactgtccttgtcacgggtcccggttcacacctgacggcggggttgccgaaggtcccgccatcaagccgctgaaacgtctcacccaagattgactaaaccattctgtacgaatggttttatttttttgcattaaaatatttttatcagattccttcattcaagttccttccataccgataaaaagaaaaagagaatatctgggggaacttatattgttatttaaaaaagaccgcaaaaaagaaacagcttatttttcggaagccgatggaaaaaaacgcatcgcgctttcaaatcaatatgcagatgtccaaaaacagctgaaaatggtcaggcttggaaacgaagaacttcatgtgcttgaagagctgcagccgttaattaaagaacatatctcaacaatcgtcgattccttttaccgaaacctggatcacgaaaaatcattaatgacgatcattaacgaccacagcacggtcgagcgcctgaaaaaaacattacggcgtcatatccatgagatgtttgccggcacgattgatgatgaattcattgaaaaaagacagcgcatcgcttccatccatttgcggatcggccttgaaccgaaatggtatatgggagcgtttcaggatctgcttctgtcgatgatgaacatatatgaagcaaccattccggatttgcatgagcttttaaaagcgatcaaagcgacgacgaaaatattgaatcttgaacagcagctcgtccttgaagcattccagagcgaatataactgccagcgtgacgaacaagaggaaaagaaagcccgtcttcatcaaaaaatccaggaaacatccggatcactcgctgatttgttttcagaaacgagcagagccgtgcaggagctggtcgataaatccgagggcatttccgaggcgtcaaaagccggcaccgtcacttccgtacatgtcgaagaaaaatcaatcggcgggaaaaaagagcttgaaagccagcagcagcagatgaataaaatcgacgccagccttctgcagattgaagaagaaatggacaagctgaatgacatcgcccagcagatcgaaaaaatcttcggcatcgtgacggggatcgccgagcaaacgaatctcctgtcactcaacgcttcaatagaatccgcgagagccggggagcacggcaaagggttcgccgttgtcgcgacggaggtaagaaagctttcagaggatacgaaaaaaaccgtttccaccgtatcagagcttgtgaacaatactaatacacaaatcaacatcgtgtccaaacatattaaagatgtaaacggacttgtaagtgaaacgaaagaaaaaatggcgcagatcaaccgtctgtttgatgacatcgtccaaagcatgaaaacgagcaaagaccagacaggcaaaatcgacgttgatttgcaggcctttctcggcggccttcaagaagtcagccgcgccgtttcccacgttgcatcatccgttgattcacttgttatccttacagaagaataaagacaaaccgatcggcctttttcataaagggccggtctttttaatgttaacttaaaatataatagagttgacatatataaagactcgctttattgtataaacatattttgataagctggaggaatacataatgaaattgacagaaatgatgcatattgccgtgtttaccgccattatgggacttttggggctgctcccgccgcttttcttatcctttacgccggttccgattacgctccagacgatcggagtgctcttatcgggaagcatcctaaaaccgaaagcggcgtttttaagccaattgctttttttgctgattgtggcatgcggagcgcctctcctttcaggcggcagaggcgggttcggggtttttttcgggccgagcgccggatatctcatcgcatatccgctggcggcattactgctgagcctcagcatccaaggccttcgctcagctgctgtcccccatttgtttatcagacagttcttgttcggcgtgctgtttttgtatgtcatcggcattcccgttcaggcttttatgatgcacattgatatcttaactgccgtaaagctcagcctcatctatgtgcccggagatctgcttaaagcggccgcagcctcattcgcagccgtaagaatcagaaaaactcttcaagcaagccggcttttgccgacgaaaggaagctgattttagtcatcatgattacatcatcatattcagatacagccggacaagcgccggaacagatcgcaattcagacagaaacagaacagatcacctatcaaacttggaacaggctggttaaccaaaccgcaaactggcttggcagccttttaggtaagccgaaaaacattgcaatattactgccgaacggcatcccttttttacaacttttcgcaggggcggcgcatgccggctgcacggcggttccgttagatccccgctcggcagcggcggaactcgcggaccagctgaacatcagcaaaaccggcctcgtcatctgtgaccgccggctgagcggcagactggacggcgtcaaaacgcctgtcatcctgtgggatgaatgcaggcctttgatcgaggcggaaaaaacggaaggcgctttgatcaaaaacgccggcctgcccttttataccggattcacctcgggatcgaccggtaagccgaaagccttcacccgctctcaccgttcgtggctggagagcttttcttgtacgaaacgtgaattcggcatttcccctgatgacaaagtgctggtaccgggcacgcttcgctcgtcacactttttatacggcgccgtcagcactttgtttatcggcggaaccgtcatccttcaaagaaaattcaacccggccggaatgaaagaccggctcagacaagctgacgttctatataccgttccgacaatgacggacgccctgctctcactagagtcgtttccggatacaccgctcaaggtgatttcttccggtgcagactggcccgcttcgtctaaacaagcgctgtcagagcgctatccccatttgcggttgtacgatttttacggaacgtctgagctgagtttcgtggcgttcttatcgcctgaagacagcgcccgaaagcctgacgcggcgggccgcccgtttgaaaaagttacaatcgaaatccgccggcccggcggagaacgctgcatgccgggcgaaacggggaagatttttgtgaacagcccgatgaaattttccggatacatcaacggcgcaaaacctgatgattccggctggatgacggttgatgacatgggatatattgatcgtgaaggctatctttatatcgaaggacgtgaaaacgggatgatcgtatcaggcggcctgaatgtattcccggaagagatagaacgtgtgctcaaccgctgtccgggcgtcagaaaagcggccgtcatcggcattcctgatgattattggggcagcatcgccgttgcggtgatcgacggagatgcaaatgtaaaggaactgaagaaacagtgccgcgagcagctggcggcatataaaatcccgaagaaatggctgttttcagaaataccggaaacagccggcggaaagatcgcccgtgccgccgtacaaaagcaggcaaaggacatgatggaatggaagctgtaattacggatgcgaaacggacaattttcgcccgggaaaacggcctgttaaaagactgtctcccagaagatttggcagctccgctgatccgccatttgagccggaacatgcccgaagacattgatgaagtcctgatcggaaacgcgacgggccgcggcgggaatctcgcccggctgtcagccttggccgccggacttcctttgagcgtgtccggtacgaccatcgacaggcagtgcggctccggactggacgccgtgagggtcgcgtgccactttgttaaagccggtgcggggagcacatacatcgcgggaggagcggagagcagcagccgttcccctttctcatcccgggcgcgcttttctcctgaacacatcggcgatcctgatatgggcatagcagcagagtatacggcacaggcttacggcgtaacgagaaagatgcaggacgaatatgcccttctcagctatgaacggagcgtcaaagcgcacgaagacggcttgtaccgcccggaaattcttccctgtcacggattcgccgctgacgaaaacatgctgaaaaagcggaacatggagcctctcatctcccgtgccaaacccgtctttcagtccggaggctctgtcaccgccgccaacagctgcggaatttctgacggggcggcggcagtttgtgtgatggaagaacaaaaagcgcggtctctcggtttaaagccgggattgcgttttatcggaagcgcggtaagcggcgtccatccgcattatccgtcagcagctccggtgtatgccgtcaaaaaacttttgaaggaacgggacctgtcaccggatgatattgatatatacgaaatcaacgaggcgtttgccgtcaaaatatgcgttttttcacagcagcttctagtgccgtattctaaaataaatgtccggggcggcgctctggccgtcgggcatccgtacggggcttccggggcggcgcttgtcacccggcttttttatgaagcaaaaagacgcccggatgcccgctacgcagcagcagcgatcggcagcggaggcggagtcggactggcgcttctctttgaagtgttaacgtaacggcagtataatagatgatatcgataaaaaatgatcggagtggagactttatgactgccgtttgtttagtaagacatggagagactgattggaatgcccaaaagaagcttcaaggcaaatcggatattccgttaaatgcgacgggagagcgtcaggcgaaagaaacaggagagtacttaaaggggtccgaatgggatgtcatcgtctcaagcccgatgaaacgggccagaaaaacagctgacattattaacggatttttgaatcttcccattgtcgtcatggaagatttcagagaacggagctacggtgatgcggaaggaatgtctttaccggaacggtcgaagcgctacccggataaaaactacccgaacatggagacagcagaagagctgacagacagaatgcttgccggtttagtgaaagttcaggagcggtttcctgagcaaaaagttctgatcgtcgctcacggcgcagccattcatgccctcttgtccgccatttctgacggtgataccggcatccaaaacgcaaagcttgtcaatgcgtgcctaagcaatatcgaacgaattgaaaataagtggcgcgtcaaagattacaatgtaagcagccacctatcagaatcataacaaaaaggcccgaattcagttttgggcctttttggcgagcatttttttctgaagatcatgtaatatggcgtccgccccgtcaatgctccggcgctccgtccataccgccctgtccgcgcggtaaacgtgtccgttttttacggctgtcagctgtttccagaggtgatttttttcgagttctttctcaccgtccaacagcacgatgtaatcaggatcgatatgcaaaagctgcccgggcgccatcttgatagagtctgatttcccgccggaatccgtctggaccgcataggtaaaccctgcgagcgtcaaaagccgggacgtaaaaaactgatcatcctttacggaaatgctgtcatttgcagcgtcaattaataaaatcgtgccgccttctgcatccagctttcttttgatgtcattcagcttttcttcctgagccgacaattgtttctctatgatgccatctttaccgaccgccttttcaatagtaagggcagcgtcaaccgcatcctgataatccgcagcttcattttttaaagcgattgtcggagcgatctttgtcagttttcggtatatccccctgtgaaggcttgagtctgcaatgatgagatcgggctttaacgaagtgatctttttcaaatcagggtgtgacggtggtccgacagacggactgccgtcttttcgctctgtccggttatccgccgcggccgccggctttatgccgagatcatggagggtatcaataaagccttcattcaatacggcgatgcgatgcgggtgcgcagccacatgcgccgtccccagatcgtgcctgacggcggtttcatgttcctgttctgagcatgccgttatgaagagaacggataagatcatcagcatactgaaaatttgtttcatctgttccccctctttcgttttcccgcaattatatcattgacaatataagtatcaatgatattcattatcattatttttataaaatggtttcacagcttttctccgtcaagaaagccgaagactgattcatgccggccgctttatttcattccgctttcgtttccatcagacttctgcattcaacaaaaggtgacatttatcctgtttttgccgcagcttccaaaaatggaatcaaaccgttcgacccagcaaacaagagagcgattgcggctgtgtacaaatactcatgtccttccatcggttttttccattaaaatttaaatatttcgggttcctattaaacgaaagagagatgatatacctaaatagaaataaaacaaattgaaaaaaattgggtctactaaaatattattccatgctatacaattaatccacagaataatctgtctattggttgttctgcaaatgaaaaaaaggagaggataaagagtgagaggcaaaaaggtatggatcagtttgctgtttgctttagcgttaatctttacgatggcgttcggcagcacgtctcctgcccaggcggcagggaaatcaaacggggaaaagaaatacattgtcggatttaaacagacaatgagcacgatgagcgccgctaagaaaaaagatgtcatttctgaaaaaggcgggaaagtgcaaaagcaattcaaatatgtagacgcagcttcagctacattaaatgaaaaagctgtaaaagagctgaaaaaagaccctagcgtcgcttacgttgaagaagatcacgttgcaaaagcgtacgcgcagtccgtgccttacggcgtatcacaaattaaagcccctgctctgcactctcaaggcttcactggatcaaatgtgaaagtagcggttatcgacagcggtatcgattcttctcatcctgatttaaaagtagcaggcggagccagcatggttccttctgaaacaaatcctttccaagactacaactctcacggaactcacgttgccggtacagttgcggctcttaataactcagtcggtgtattaggcgttgcgccaagcgcatctctttacgctgtaaaagttctcggcgctgacggttccggccagtacagctggatcattaacggaattgagtgggcgatcgcaaacaatatggacgttattaacatgagcctcggcggaccttctggttctgcagcgttaaaagcggcagttgacaaagccgttgcttccggcgtcgtagtcgtagcggcagccggtaacgaaggcacttccggcggctcaagcacagtgggctaccctggtaaatacccttctgtcattgcggtaggcgctgttaacagcagcaaccaaagagcatctttctcaagcgtaggttctgagcttgatgtcatggcaccaggcgtctctatccaaagcacgcttcctggaaacaaatacggcgcgtacaatggtacgtcaatggcatctccgcacgttgccggagcggctgctttgattctttctaagcacccgaactggacaaacactcaagtccgcagcagtttagaaaacaccactacaaaacttggtgatgctttctactacggaaaagggctgatcaacgtacaggcggcagctcagtaaaacataaaaaaccggcgtcggccatggccccgccggtttttttattatttttcttcctccgcatgttcaatccgctccatgatcgacgggtggctccctctgaaaattttgacgagaaacggcgggttgacccggctcagtcccgtatcggccaagtcctgaaacgtctcaatcgccgcttcccggtttccggtcagctcaatgccgtagcggtcggcggcgttttcctgataccgggagacggcattcgtaatcggatcagaagcaaaactgagaacggatatgagcagcaataacagcgggagggccgccagatcttcaggcccctttatatgaagcattcggccgaagaatttggacagccgcttataaagcttgtcaatgatatagaacccggctaatgacagcaggagatacccggccagtccgatgtacacgtgcttcatcacatagtgccccatctcatgccccataatgaacaaaatttcccgatccttcagtttgttaagcgtcgtatcccacaaaacgattcgcttattcgaaccgattcccgtcacatacgcattcagcgcattcgttttctccgacatatttacttcataaacatggctggccggaatgtcggctttgtcggcaagcgacaagattttgctttccagctccttgtctttcagcggatagaaatcattgtataaaggatcaatcacgaccggctgcaggaaaaacaaaaacagggtaaacggcacagtaagacaccaagcgtaaaaccaccatttttttgtatgctttgtgatcagccagtaaaacacaagcacacacacggcaaacagcggaaaactgatccagaaatcaatgacatggtctcttatccagcttgctgttgtctgcgtcgaaatatgatacgcaagcgaaacccgatatccaatccattcaagcggaagcgaagccgccgtaacgatgagtgaaatcacaaatacgaagcttacgatttgcagcacccgaaagcgcaccgcggcttccagccaatgctttatttttttggcaagccccgtaatgagcagcagaaaaaataaaaaccaatctaacggcgctccgatgaaaaataaaaaatcctttacatttgaaaagttttcagcggctgccaggcggcccgggtccataaacgaggacggatcggctttcgttccctttacggcctccgggacggcggagtcgcctgtcataaagaaataccaatagaaaaaaaggccgtacagcacataggcaagtcccgctgccgctatccatttgcgcatggaagtctccctccttagcctgatgacttactcctattgtaagcataaatgcaaataaatagaaccaagcctccgaaacggatgttaatcttttcacaacagaaaagaatggaacaacaggaagcgggaaagactaaaagacggagtgatgaatatgaaaaaaataatcgcgtttattgtagtaatcgcccttttggttattgctttcttctatgtatacagccggaccggcgatgtgtttccatcaagcaacgcagatctgattattctgtctgagcacggaaaaaaagaaatcaaaattaaagacaggcagaatgtaaaagatatgctcgatatcttgaaccaaggaaaacaagtcaaactgaccaaaagcgtgtctcccgattacgacggaacggtcaaataccatgaagaccgttttgattcattcagcatgtggctcgaaggcggcaattatatgatgtacaagtataaaaacacgtattacaaactgacccggcatgatacgaagcttgtgcaaagcatcattaaggaagaatcgcagagctgaccggatcagcatgtaaaagcgaagcccccggcttcgcttttcgtctgtcatttcggaagcatgtcccggaccgcccgcctcagcagcttcccggtcgcgttcttcggaatctcatcaagaaaaaccacttccgccggccgtttatattttgccaaatgtgtttcacagtaatcaaaaaccgcctgctctgtcagctcaccgtcccccggcactatataagcatgcaccgcttcccccgttttggcgtcaggaacgccgatgaccacggcttctttaatgccctcatggctgtagagcacttcttctacttcgcgcggatagacgttgtatccgccgacgagaatcatatctttttttctgtcgacgatataaaaataaccgtcttcatcgcgcttcgccaaatcacccgtgtacagccagccgtctttcagcgcgtgctccgtctcctcgggcatcttgtaatagcctttcatcacattcggccctttcacgatcaattctcccacttgatggtcgggcaattcgcgtccgagcgtatcgacgactttattttcgacatgtaaaatattcgtcccgattgagccgggctttctcccccggtcaaacggattaaaacaagtaaccggagacgcttcagaaagtccgtacccctccagaatggtgacgtcaaaggtttgttcaaatgtctgcaacagagcgaccggcatggaggccccgcctgaaatgcacagtctgacggacgcaaaatcctccgccttgccgtgctcgtattgatacagatagttatacatcgtcggaacgccggcaaaaatggttgcctgacggcttttaatcagtttaaacacagaagccgggctgaattgcggctcgattaagacacacgctccgctcatcagaggcgcattcatacagacggttaaacaaaaaacgtgaaacatcggcaatgccgccacaattttgtctttctcattcattcctaagtatccggcgacatcatttgcattggagaaaagattctgatgggtgagcatggcgcctttcggttttccggtcgtccctgaggtgtataaaatgacggcagtatcatctttggacaatgtcggataagttctgctgcgctccgccgggcgaagcatttttgtaaacgttgtcatttttaagcgcaattgagggtcttctgtcgatggagcgttctctgctgtctggctgataatgatatgctccagcagcggcagcgagccgtgcaggctttcaaatacgggaattaaaaggtcgatgccggcgatcgctttgacatcgccgtttttcagcatgtatgcgatttctgaaggtgtatatgccggattaacaggtatgacgacaattcccgcttttaacgcgccgaaaaacgcaataacaaaatcaggcgtatttccgagcagcagcgcgagatgatccccttttttcagtcccctgtcctccaagccgtttgcaaatgctttgattttacctgccagctcctcatacgtcatgtactgatcttgaaacagacaagctggtttttccggtttctgcgatgccgtttcttccaatttggaaaccagattcattttcccacccctttaaaaattgtaatgaatgaatagtcattcatttatccggaataaacgttcacttttattatagaaaaatatagaaaaacactcaagggcaaaaagccccgagtgccgtaaaaccggaaactataattgtttcagcgcttcactgaccggcgtgccgcccgccgtcagatcgaatgctttttcatacgtattcggttcatcaagggatgcgataacggtcttggcgacatcgtctcttgaaatggaacctctttccaaatcggccgcggctttgatttttcccgtgctgggatcatttaataacccgcccggccggataatcgtatacgtcagaccgctcgcttcaagaattttatccgcataatgctttgcggcgtaatacggcttcagcgcttcattccaattgccgcggttatgagcctgaagggcgcttaccataatgaaccgcttgatgcctgctatctttgccgcttctatcgctttcgcggctccgtcaagatcaatcaaaagcgtcttatcgtatccggtgcttcctcctgatccggcggtaaacacaatcgcgtcacagccttcagcggctttcgcgatgtcttccgggcttccttccaaatctgcaagaacggcttctgttcccgcggcttgaagcgcttctttctgctcttgtttccggaccatcgcccgcagcgtatgcgtgccgtctttttgaaacagcccggtcagccgctgtccgatctgtccgtttgctccgatgagaaatactttcatcatgatccctccccattcattatggttctatcatttcacaaaaacgggcgctgattcaaatcatgcgttcggcaaatgttctaataaatcagctcgaggaaatcttccagctctattttgccgaaatactgtttcagatcgattccggccagcgcctccttgatagcggttcggtcatactgttttccggtcagcgcctgttcgacttcactcacatctttcgcaccgaagaaatcaccgaaaattttgcagtcctgaatgattccttttttcacttcaagacgcagatcaatcgatccgaccggataacgtttcgaatgctgaagattaaatgcgggcgaccttccgaaattccagtcccagttttgatagcgctcttcggaaatcttccggatcgctttccagtcttcatcggtcagtttatattccggcacttcggaaagatcatttgtattaaaaatatggtgaagcaggtgctttttgaattcatccgccgtcattttgtcatcaagaaactcgctgatgttggcgacacggcttctgatcgacttaatgccttttgattcgattttgtcttttttcactttcaaggctgacacaacatgatcaatggcggaatccagcattaatgttccgtggctgaaaatacgccctttcgtcgaaaattgagcgttgccggaaatttttctgccgtccgcgacgatgtcatttcggccgcttaattcagcttccacaccgagctggcgcagcgcctgaataacgggttcggtgaattttttaaaattgtgaaagctgtcgccgtcatccttagtgataaaactgaaattcagattcccgaggtcatggtaaaccgcgccgcctcctgacagcctgcggacgacgatgattccgttatcttctacgtatttcgtattgatttcttctattgtgttttggttcttcccaatgataatcgacggctgattgacataaaacagcaggtatgtctgttcagggtcgagatgcttcacgcaatattcctcaatcgcgaggttgatcctcgggtcggttatgttttggttgtcgataaataacatggtgctcctcctttatttctcccacttcaatccggaagcggcgattgtcacttcgcccccgaactcggattccgcttcttctttcagcttccggtgctcgccgaaatgaggcagatgcgtgagaatcagctcccccgctccggcctccttcgcgatccgtccggcttccaaactgttcatatggccggctgacgtgccgtcctggtctgcgtaaaaattgcactcgcagatcagcagatcggcattttccgcaaacgggataaacgcgtcctggtagcttgaatcagccgtatacacaacagaagctgaaccgtcagtaatccgcatcgcataacaagtgaccggatgcaccgttttcagaaaggtaatggtgaacggacctagagaaagcgggcggtccggctgataggccactccttttgtatgcgttttatatgtaaggcgctcaaactgttctatatcagcatcatgcccgtaaatcggcagtgcatgcgtcccttttccgagaaaggagccgacctgtttggcaaattgaagcggcccgatatcagcgatatgatcatggtgataatgggacaaaatgacggcatcaagctcttctgccggaacataggcaaacagctttgataatacggcgcttccgcaatcgacgagcagagaatagccgccggactgaaacagatagcctgaagttgcttcgtttgcggccggaaacccgccgcagcacccaataactgtaactttcatatgatcctccaatgtttatgataaaaagatcctttcctccaatatacctatttttcgtacaaattgcatgttttaaacattgtgccaaaacagccgttgattttcttaaactgttataatacaatgtagagacaaaacaatgaaagagggatgggtatgttggaaaagatgtcggattttttcagaaatttacccggtaagaaatgcgaagaatgcggaaatgagattgttgagcagtatgagtgtcacattaatctgtgcaatgactgcttgaaaattaaggatatgtgacaatagggcgccgcacaattctaagttgtgcggcgcccgttttttcggccgtcatcatactttctgaatagggcgttattcaccattattagcaattatctgtacgttttaaaagattcagtatattcaatctatatttttctatagacggattgttttcttttctattataatttgttctaatagctatctttttagatacttattgcacttttttcttcgggaggtaatctatgaaaaaattacgctttggactagcgacgcaaattttcgtcggactcatactaggggttgtagtcggtgtcatctggtacggcaatcccgccattccaacatatttacagcctatcggcgatttgtttttacgcttaatcaaaatgatagtgattccaattgtcgtctccagcttaatcatcggcgttgccggcgcgggaagcggaaaacaagtcggaaaattaggcttcagaacgattttgtattttgagatcattaccacttttgccattattctcgggctggctttggcgaatctgtttcagccgggagcaggcgttaatatacatgaagctcaaaagacagatatcagtcaatatgttgaaacagaaaaagaacaaagcggtaaatccgttgcggacacattcctgcatatcgtaccgacaaacttcttccaatcattagccgaaggagatctgcttgccatcatctgctttacggtgctgtttgcactcggcatctcggcaatcggtgaaaaaggaaagcccgtattggccttctttgaaggtgtttctcatgcgatgttccatgttgtgaacctcgtcatgaaagttgcgccgtttggtgtttttgcgttgatcggtgttaccgtttccaaatttgggctcagttccctgctttcactcggtaaactggtcggtttagtatatgtagctttggctttctttctcattgttgtattcggaatcgtcggaaagcttgccggtttaaacattttcaaattcctcgcctatatgaaggatgaaattttattggcgttcagtacgtcaagctccgaaaccgtactcccccgcatcatggagaagatggagaaaatcggctgtccgaaaggtattgtttcctttgttgtgccgatcggatatacctttaacttagacggatctgtgctgtaccaatcaatcgccgctttattcctcgctcaggtataccacattgacttgaccatttggcagcagattacccttgtgcttgtcttgatggtcacttccaaaggaatggctgccgtgcccgggacttctttcgtcgtcctgcttgcgacactaggcacaatcggcgttcctgcagaaggccttgcattcatcgccggtgttgaccggattatggacatggcccgtacggtcgtcaatctgaccggaaacgcgctggcatccgttgtgatgtcaaaatgggaaggccagtatgatcccgttaaaggcgcgaaggtcatgagcctcgccaaaacagaacaaaacacaaccatctcaggttaaaatgaaaaccctgcacggaatgatttccgcgcagggttttttatgccatcggcgataaaacgtaccggtgcaaaagcttcgccgtattaagaagcgataattcatgcgtgcgttcaaaagcgtgtgaagcgtcaattcccgggccgatcagcccatggacgatgtcatggcccgaacggatggctgctgaggcatcagaaccgtaatacggataaatatcaagctgataatcaatgccatagcgctccgcaagcccggccagatgttttctgagctgataatggtacgggccgctcgcatccttcacgcaaatggagacggtatattcatccgtagactggccgtcgccgatcgcccccatatcaacagccaagtattcgacggtctcaggaggaatgttggaattgcctccgtagccgatttcttcattattagaaatcagaaaatgcgtcgtatacggaagttcgattttctcttccgtgatgcggcggattaaattcaagagcagagccacgctcgctttgtcatcaagatgccgggacttaataaagccgctcggcgtaatctgcacgcgcgggtcaaatgagatgaaatcgccgaccctgatgccgagatcggacgtctcttccttcgtccggacaggctcatcaaggcggacttccatattctcctgattccgctctgccttgccggcgtccttgtagacgtgcactgaagtctgatgcattaagatggtgcctgtataggttttgccggaagaagtttggatctcgcaatattccccttcaatcgagtgatatcggaagccgccgatcaagtcaatcttcagccggccgtccgcctttatctcctttaccatcgcgccgagcgtatcgacatgcgccgtcagcaatctgtgtttcttgtcatcacggccgggaattgtgacaaaaagaccgcctttgcggtttctgtaagaggagacgccccattcttttaaaagactttctgtataggcgataacctcgtatgtattgcccgtcggactcggaatcgacaccaattctttaatcagttccatcgtatgtttcatatttgccacaggtcattcctcctatcaattttattcttcttaaaatatactcttttgatccataacccgtccaatcttttccttctcttttttcatagaatgaagggagcatgagcataggagggaaatgtatgatcagccgtaaaccgcacaagcggaaaaggtttcataatgattggtttgaggattggtttgaggatgattggtctggtgcagccttctggggctgtaaaaaagaaaaagatcactgtaaaaagaaaaaagaagacccttgtaaaaagaagaaagataaaaagaagaaagataaaaagaagcatcatcattcatgccgccgctgctgccgtcattggtaatcgttcacacaagcccgttttacaaatagatatctcatgctccccaaacagcggatgctgcttgggtttttttattaaaattagtaccaagtaataatatcaggtgttataatctgatataaaggagtgatttttcatgtcaaaatctaaaattacagcaatcggtacatatgctccggcacgccgattaacaaacgcggatttggagcgcatcgtcgatacatctgatgaatggatcgtccagcgcaccggtatgaaggaaagacgcattgccggcgaacatgaattcacatcggatttgtgtgtggaagcggtgaaaaaccttgcagaacgatacagcggaactcttgatgatgtcgatatgatccttgtcgccacaacgacggcggactatgcgtttccaagcaccgcggcacgcgtgcaggcttacttcggctggccgcacacgggggcgcttgatattaacgccacatgcgccggactcacttacggccttcagctcgcagacgcattaattaccgccggttcccatcaaaaagtgattgtcattgccggtgaaacattatcaaaggtaacggattatactgaccggacgacctgcgttcttttcggagacgctgcaggcgccctattggtggaacgcgatgaatcagcgccgggctttttggcagccgtgcaaggaacagcgggaggaagcgcggacgtgctgtatcgcacgggactgagcacagaattaaacggcgagccgcttaaaggcggaggaaacatggtgcaaaacgggcgcgaagtatataaatgggcggccagaaccgtgcctgaggaatgcaatgcccttttagaaaaagccggcttttcaaaagacgatctggattggttcgttcctcacagcgccaacatgcggatgatcgaatccatctgcgaaaaactgcccttcccgcttgaacggacgttgacaagcgttgaatattacggcaacacttcatcggtttctattattctcgcattggatgaagctgtgaaagcaaaaaaactgtcggaaggccagacgctggtattattcgggttcggcggaggattgacgtataccggactgttggtgagatggggattttaaaagtacgacgatcgaaatctaaaaaaaagaggccctgagcatctgctcagagcctctttttcttatgctgttatttcttcttccgttttgtgttcttttttgctttgcaccgtaaaatacacgatggtcagcgcgatcatgacaacggcgatgcccaacagaatggatgcctgctgccacatgtagccgtagtcgccatttgaaatgacggcacggaacccgttgatgctgtaagtcatcggcagtgccccgtgaatcacttgatagaatcccggcaggagttcaagcgggaaggttcctccgcttgccccgagctggagcaccagaatgatgacagcgataaagcgtcccggattccccatcgttgtcgccaataattgaatcatggacaggaacgcgatgctggtaatcatcgtaaagagatagaatctccacgtgctttccacatcaagcccgattccttttaacagaaccgtggcgacaataacggattgaatcagtccgacaagcagaataacactaaatttgctgaggaaccattcaaaaccgtttctcggacgccctgaagcttcactcagagggaatacgaccgtcagcatcaatccgccgacatacaagcccatagagagaatataaggcgtcagtccggtaccgtagttaggcacggaatgaatcgcgttatcgtccgtttttaccggatcggcaaacatgctgtacgttttgtcatctgtcttaatgtccccggtttgatcagccgcatctttcagctggctggacaattgtccggtgccgtctaaaagcttgcttaaaccggtgccgagagacgcttgaccctgctcaattttggacgagccgtcatggattttgttttgcgcgtccagcagtttcgttaagccgcctgacacttggccgctccctgacactaacgcttctgatcctgatttgagctgtccgaacttgctgttgtattcgccgatgccggccgtcagtttgttttggctttcaaaaacagtctgcgctccgctgtataatttatcagttcccgctgtcagctggttaatcgcgtcttgtaccgccgctgcgccgttatacagtttcgatgtggactgaggcagtgctttcagctgatcagccttcgcttttacatctttgagcgcgctttttatgactgacatatccggaagctgaatatctccgccggacggaagctggctgacgatattgtctaaatccggaaggtcagccttcggaagcttctcattcagaagctgaacaagtttcgctttttgctcatccgttaagaaatcactgtccttaatcacctttttgaccgcgtcatcccgggcatccaggctgtttttcagatcagaaagcttcttcttaaactgctgcaggtccttttcagtctgttcgagctgcccaaccgcgttttcaatgtctgacaggttgactgaattgatcgcatcttcaaatgccgccgctttttgcgacacttcctgcgccttgctgtttaacgcgcttaatccattcgttaaatccggaagcttttgctggagctgcttttgtgcgtcaaggcttgttttcagcccgctggccacttggcctcctcctgaagcaatctgtcctgatttatcttgaatttcggcgcttgcgctctgaagttttgcgatagagctgtcaagcgtttgaattccgcttgtcactttcgccgcgccgtctgcaagctgctgtgttttatcgccgatggtggcggtgctttcagtaagcttcgctaaattttccttcagcttggcgctgccgtctttcgcgtttttcgtgccgtcgtctattttcttggctccgctgctggctttgccgagccctttggcaatatctttaaagttatcaaaaatgacttttgcgtattgctctgtcacttctttcgacacggaggctttcagtttgtcgatcgccttttccccgattgtcgcgccgacatagtttgatccggcattcgtatgatatttcagatccaacttcttcggatttttatccattaccgtgctggcgtttttagaaaaatcttcaggaatctcgaccaataaataatatttagcatttaataagtcctttaacgattgatcaagatcgcttgaaaaatgccaatcaaaattatcatttttctttaactctttcacaaggtcgtcaccgatctgaagatgtttcccttcgtagtccgcccctttatcctggttgacaacgacaaccggcagctgatccaccgtgccgtacgggtcccagtacgccttcaaaaacactccgctgtagatcagcggaacgaataatatggcaatgatggggattaacagtttcttgttcgttacaatgtctttccactggctttttattgtattcaaccctgttgcctccttccgcaaactgactcatttgacaaaacggtcacggcacctaaaaagtgaaggatcatctattatttagataatccttgaccaacatacatttccagcaattcagcgatcgtctctttttcaagaggcggatggtttttttcccagtcaaatatcagtgcgatgtagagcttgagcatcacaaaagcggtcagttccggatcacacggtttaatgcttccgttttcaatggctgtttctatcttttctttaatgtatgacagaatggcccgctccattttcacaatgacatcctgaacggctattgtaccaatctcggtgttctcctgaaaaattttaatagtcagctggtgtgtttttctgaattccaaaatcgcgacaagcgcccggtggacattttcgtgaaatgaaagctccggtttcatcgcttcgtctgcgtgttccttcatttctcttaaaatagtggtgaaaatatcatcaaacagttcttctttgtttttgaaaaacgtgtagatggttcccttccccacatttgcaagctttgccaccagatccattgtcgttgctttgtagccgaattgtgtaaaagacttcgttgccgcttccagaatgagctttttccgatcgacggacatgtttcccacctcgttaaattgaccgtttgaacgttttagtcattttgtacataagataacttatcacagtcacaaagaagattcaaatgttttctctttttattggtgttccctttacagaacgggaacatgcaaaaaaacctccgttttacgataacggaggctggtacgtttcaaataaataagccagtgaatcgtatacggcggcttttccctggtcgatacagtcggggatgcccaccccttcgaaagacgcgcccgtcgcgtatacgcccggataggaagctttcagcgcatctctgaactctttgatgcgctccttatggccgacatggtattgcggcatgctttcgttccagcgggtcacacaggtcatttccggttcgccatttattttcattacttttttcaaatcttccattacgattttaatgatctcgttatctgaaagatctacgatggattcatctccggcctttccgacgtacgccctgagaagcgttttgccctccggcgccgcgtgcggccattttttattcgtccatgtgcaggccgtgatggagaagtcgctgtttcttgagataacgaatcccgtaccttcatgctccatcttgacggctccctcaggaaaacctaaggcgacgttggcaacggacgtagaatgcatgtctttaagacatgaaaccgccggcagatcagaaagcattttcgccgcggctttatgcggggctgttactatgcatccttccgcatagagcactttgccgttatcaagcgtcacggaatatcctttctcctcgcggccgatatgggtgactttcgttcctttcatcacctttgtcagcgtaagctgcttttccagctcctccaccaacgtttgaagccctgtcgtcagcgttaaaaactggccctgctttttggccgtcagctgctgtcccgaaggctgcggacgtgattttttcataccgagaatcaggcttctgtgcttctgctcagtctgatagaattgcggaaacgtggacatgaggctcagcttatcaatatctccggcataaatccctgataatagcggttctattaaattctcaacgacttcgtcaccgacgcgtctgcggaaaaattcacccagagactgatcttccttcggtttgctcgcaggcaggacaaagtcaagcgccgcccgcgcctttccgggaacagaaaataaaccggtggagatgaacggagcgattttggtcggaatgcccatcaccgcgcccttcggcatcggatggagcgtctcgttgacgagcacgtaagactggccggtcgcattgttgacgagcagatgctcaagccccaaatctttgacgagctgcggcgcgctttttttcctttccaaaaaagaatccggcccccgctcaatgatgtagccgtctttatgcgccgtctgaattttgccgcccgctctcgggcccgcttcaatcagagtgacctcaagcggcagctgtttttctttgatttctttttccatgtagaaggcggcggctaatcccgttatgccgccgccgatgatgaccagatgttttttatcgccactcatttttatcgccttctttaccgtttaattctacttgtccagctctttcagcacgaccgctgcaagcgcgtcgataaattcaggctgtgcgttcggcatagccggacgatagtagcttgcgccgacttcttcggtcacagctttgcattcataatcattatcgtaaagcacctctaaatgatcggcaacgaagcctgcgggcacgtatacaaatgctttataaggatgcttttggtacagatcgcgcgtgagatcctgcacatccggcccgagccacggatcaggggtattcccttcgctttgccagccgactgcgtaatcggtaattccggcgccttcggcaatcagttttgcggattcctccagctggtcaggatacggatcgccgtattcttttattttttcaggaaggctgtgcgctgagacgatcagcatcgcgtcatcccgttcttctttcggcattgattcatacgttttcttcacctggctgacccaataatcaacgaatttcggttcatcataccagctttcaacagacttgatggtcaagccgccgagcttctccgcttcttctttcgcgcgtttgttgtatgactggacgctgaatgttgaaaaatgaggggcgagcacaaggctgacagcttctgtaatgccgtctttatgcatgtccgccaccgcgtcttcaataaacggttcaatatgttttaatccgatgtacactttgaatgttacgtcatcctggatttcatttaaacgctgtgcgagcttctccgcctgctcctgcgtaatttttgcaagcggcgaaatgcctccgatcgcttcatatctgtcttttaaatcttgaagcatatgaggctccggctttcttccgcgtctgatatgcgtataataacgttctatgtcctcttctttgtaaggcgttccgtaagccatgacaagaagtcccattttctttttgctgctcattttgttaaacacctcttttgatggtctgtccaccttgattttgacaggaaaatcttcttataaccaacgatctgctcaggaagatcgttccgtttttttggccgcggagtattcatgtacaaacgccgtcagctttttcagcgttgccggattgacatcagggaatacaccgtgccctaaattgaaaataaacccgtccgttttcatgccttgatcaagtatcgctttcgcttttttctcgatgacttcccaaggcgcaagaagaagcgacggatcaagattgccctgaaccgtttttgtaatgccttgttttctggcgtcatctatgccgagtctccaatcaagaccgacgacatcaagaggaaggtcatgccaatccccggccagatggcttgcgcctacgccgaacatgatcagcggaacttgttctgctgaaagctcccggaatattctgtccatcaccggttttataaactgccggtaatcttcgcggttcagcgcgccgacccatgaatcaaaaatctgaatggcttttgcgccggcgttaatctgcgctttcgcataaacgataatcatgtccgcgagcttgtccatcagcatttgccacgcttgcggcatactgtgcataaacgcttttgttttgttgtaatttttagaaggcccgccttcaatcatataactggccagcgtaaaaggcgctcccgaaaaaccgatgagcggaacattcagctgttcgtttacgagtaatcggatcgtttccagcacgtaaggaacatcctgttcgggattcagttcgccgagcttttcaatatccgcagcagagcgcaccggctgatcgatcaccgggccgattccgttttttatttcaacatccactccgatataaggaagcggcgtcataatgtctttatataaaatggcagcgtccactccgtactgctcgaccggaagcctcgtcacatacgcgcacagctcgggctgatgcgtaatttcgactaagccgtacttttccttcagcttgcggtattccggctgagacctccccgcctgtctcatgtaccagacagggacgtgatttgttttttctccccgtgccgcttttaaaaacgtatcattaaacgcttctcgtttactcatctgaatttccacctttcctcctgcaaccatacgttcgtgttcttcgcccattacactataccttgttttttcaaaagcgtatagaattgaggcttaatgttcaaaaaatcgccgaattcatgattaagaagaaaaaagcttcggctgaacgtattccgttccctctccttcttgatccgtctgtgaattatatggaacgactttgtatgaagcccctgaaaacagattggcgtacggtatgtcaaagctgccttttcctttcaccgaatccagaagtttgtcttttccgtctttcttctcatatattcggtaaacaacccgatcatccttttgaatatcccattttaattgaaccgtaatcagtcccatcgccttaaatgtataacgggccgacagggactttaccgcctccagctcaatcgggctgcccagttccttcacattttcaggctttttgaatgtccggccgttttcccccgcttttgtgacgatatctttaaagagtctgaccgggtattggcttccgcctttcaggtaatgggttttatccgttttgtcatagcccatccagacggctcccgtcagtccgggagtgtatcccgcaaaccaggcgtcctttgtcgcgccggggacgccgggaaatgtggtcgtgccggttttccccgccaggtcaccttgatagctgccttgtgaagcggttccttctttcacgacctgctgaagcattctcgtcatattccatgccgtctgtccgctgaagacgcgcgttttgccgtttttaggcccggataacgtttctccgtcttcgtccgtgatgttctctataaaaaatggcttcgtatacattccgtttgccgcaaaggtatgataagctccggcaagctgaagcggggtgacgccttctgacagaccgccaagcgcaatcgcgagtccgttgtcagaaatgttcatgccgtttttctcaagatacgattttcccgtatctacgccgatctgcttcaatgtccagacagcgggcgcatttatgctgtaagtgatcgcatcctgcatcgtcacttcccccttgtactgtccgtcataatttttcggttcatacccgtcgtaggacgtcagtttgtcttggagaagcgaatacggtttgaacttgtcttcctgcatggcgggcccgtatacggcaatcggcttaaacgttgagcccggctgccgcttcgccgtaaccctgttgtatccttttgtcacgtagtcgcgtccgccgaccgccgcgcgcacgcctccggttttattatcaataaagacggcgcttccctctgccgcctgatccgtccccggaaaatagccgctttccttcatgagggtgtatgccgttttctgcagcttggaatcaagtgacgtccggatcgtatagccgccttgaagcagctgttcacccgacatcgaataacgggattccgcctccttgatgacaagatcgatataactgtcaaaccaaggcgtttctgatgttttcttgacattaagccccaatgtccggccctgggctctgacggcttccttggcgctgatatagccttggtcgttcatcattgcaagaatcgtatcgcggcgttctttatttttatccggatgctgaatcggcgaataaagagatggcgccttcggaatcgctgccagaacggctccttctgcaacggttaaatcttttacttctttattaaagtagtagtgggacgcggcttgaatgccgtaaacgccatggccgaaataaagctggttcaggtacatttcaagcagcttgtccttgctgtaatcacgctcaagattgatggcgataatgacttccttcgtcttgcgcaaaaatgttttatcatgagtcagaaaaatgtttttcgccagctgctgggtgatcgtgctgccgccctccaccttgccgcctgctaaaacatcccggaacaccgcccggccgacagacttcacatcaatgccgtgatgttcgtaaaaccgtttatcttcaacggcgataaaggcatctctcacatcttccggaacctgctgaatggataccggctcgcgattttccgtatagaggctcgcgatttcatcaccgttttgatcgacgatttttgaagatgcgtgcagtattaatttcttttcatcgatgacataatggccgagaaatataatgataatgtatccgattaacgcgagaaaagcggttgccgccgcaattacagccggaataaagaatctttttttctttttcagcataagtcacctcgcctttcttaacttgtagtatgggaaatattgtttcgaattatgtcagaatgagtcgccaatagaaacttataccactcttttgatatactagcaagcaggaggtggctgatatgaaggtttatattacatacgggacagccgattttttaaagacgattgcaaagaaacacccgagtgagaatatggtgctgatgcaaggggaggataatgcggttttaattcatgaaacaaatggagaaaccgtttttcaggcgccccattcctatgaaagcatcgacagcgtcggggaaatcaaaaatccgggctacgccgtcctcaacaacatcgccgttacccaggaaggccgtccgctgtttgaaaaccggtttaaaaaccgcgccggcaaagtggaaaatgaacccggttttgaagccatccgcgtattaagaccgctcgaaggcgatacgtatgtcattttgaccctgtgggaagaggaaaaagcctttcaggattggcagcagtcaaactcttatcaggaagctcataaaaaacgcggaacatctgccggcatcgacacaacgtctattttctcccgcccgtcttatgtaaccgcttattacgcaatagactgaaaaccgccggagattctccggcttttttgatgtcccgattttacgcatccttctttgcaccttccgcccgcctatgaataatctgtagcaatcctatttataaacggagtggttcaattggggatcggcgtctactcggtacatctgctttatgttgcttttatcgcggccattatcgtttttatgctcctcaggaaagatacaacctttatttcactcgccggcatttttgtgattgcgctatggacgacgcattcattctccgcttcggtcagcagcctgtttcacagcttcacgtatgccgccggagaattgctgccgacgatttttatcatttgttttatcgtggcgatgagcggcctcttgaccgaaaccggtattaatgaagcgatgatttctccgtttgcaaaggtgatgaaagggccggctgtcgcgtattgggttatcggctgtctgatgtttgccatctctctttttttctggccgtcaccaggggtggcgctgatcggcgctgtgctgcttcccgcagcgatccgggcgggcctttctccgatcgccgcggcaatggcgatgaacctgttcggccacggattcgctttatcgggggattacgtcattcaggcggccccgaaattaacggccgatgccgcgggcattcccgtgagcgatgtcatgcaggcaagtattccgctcgttttgatcatggggttaacgacgacaatcaccgctttcttcctcatcatgcgggatcgaaaaaaaacgaaggcccccctctccttggacagctccggttctttggacacaagtatgtatctgccgaaaaaactcagggtggtcctggcggttttcattccgcttgtttttctcgccgatattatctgtatgatcgtataccgcctgcaaggaaacgatgcgacggcactcgtcggaggaaccgcgatcggcattctcctgatcattcatttcattgtatataaagagcggcatttagaaaagatcaccgagtattttatcggcggttttcaattcggctttaaagtattcggccccgtcattccgatcgcggccttcttttatctcggtgacgcggggtttaaaagtattttgaacaccccgctgccgaaaggatctgcggggatcgtcaatgacctcggattggccctgtcccattcttttccgatgtccggagaattcgccggcatcgccctggccgcagtcggtgcgattaccgggctcgacgggtcagggttttccggtatatctcttgcaggctcgatggcaaagctgttttccgccgcgcttcatacggacccggccgttttaacagcgctgggccagatttcagcgatctgggtcgggggcggaacattggtcccttgggcactgatccccgctgcggctatttgtaaagttgacccgtttgagcttgccaggaaaaactttatcccggttgcggccgggctagtcgtcacaacgatcgccgccatcatcattctcccgtagcaaaaggattgaaatcttctgacattttctatacaatcatgggaaaagcagacgagggggcatcgcttttgacgttaacgacacttcaaaaaagcttaaacgctcagcttgacgggctgtatgaggaaatggttgaaatcaggcgtcaccttcacatgaatcccgagccatcctttaaggagaaaaaaacaccggcgttcatcgcctcattttatgaaaagctcggcgttcccatccggacgaatgtcgggggcaacggtgtcacagcctatattgaagggagtgaaccgggaccggtcgtggcactcagagctgattttgacgctttgccgatacaggatgaaaaagatgtgccctatgcttcacaaattcccggcgtcatgcacgcctgcgggcatgacggccatacggcggctctgctcgcggtcggaaaagtgctgtactgcaaccgggaaaaactgaaagggtcatttgtgatgatccaccagcacgccgaggaattatctcccggcggagcaaaagcaatgattgaggatgggtgcctcgagcatgtcgatgccattttcggcactcacctttgggcgactgaacccgccgggacggtcttatgccgcccgggcgcagtaatggccgccgctgacggctttacgattaaagtcatcggtaaaggcggccacggcgcgattcctcacgatacgaaggacgccgttttaatcggctcacaaatcgtcacggctcttcagcatatcgtcagccggcgggtaaatccggtgcagccggccgtcatctcagccggctcgttcaccgctgaaaatccgtttaatgcgattgccgatcaggcagtcatatcaggcaccgtccgctcgtttgacgaaagtgtgcgcagcctgctcgaagcagaaatagaagccgtcgtaaaaggaatctgttccatgcactccgcttcctatgaatatcgtttcaagcgcggttatcccgccgtcgtcaatcatcccgaggaagcggcgcacgcggcggccgccgcagcggaaacagacggcgttacgaaagtcattgaaggagagccgcagatggccggagaggatttttcctattatctgcagcatacaaaaggcgcatttttctttacgggcgccgctttagaaaacgcggaaaccatttatcctcatcatcatccgaaatttgattttaatgaaaaagcgatgctgacggccgccaaagtgcttatcggcgccgcggtgagctacccccgatagggcataaaaaacagccggtacattacgtaccggctgctgtgattcttaaatgaaaaacgtgccttgccgtctcaccgagctgtgacagcagtttataattggccgctccgcccacggcggctccgacgaccggcaaaagctgaaacaatttcaccacgtccagataatcgcggtattcctgctgaaaaactctccaatcgacatcatgctttttcgaatcccactgttcaatcattgagtatatgcgtttccgctgttcaccgcttgagaaagccagctgaaaaataaacagcaaaaacaatcgttcatccctgtctttcacatcatagccgtaaatagaggcaagatcgaacagacatttcattttaatggataacagcaaaggaaaatcagccatccctaaaaaaattccgccggcccccgtaccgataccttcggctgccgcgaccttttggtacgatgcgatggtttgtctggcgagggcatctttttcagcaagcgtcataccgtttgtatcccgcttgcctttcaccagatttgaacccgccattgttgcttcggtcatttttttaatgctttctgtgatgacggcatgaattttatcaggaatccgctcatttattttcgcctgcattcctttagaaaaacgttcaagcatagaatctttgcgtaaaaaacgcgctttccattgcagtgcttcctgtatcagctgctgatcgtcggtcatctgtgtctccttctttcattgaggtttcaaaaacccgattgattacagcttgccgtactttttcaatcttccgcccatatacgaaggcatgatcacaaaaatcagaacggctgaagcaacagccgcatacagcgccccgctgactcccgcggcataggctgacgctgcacagaacagcagcgcctgcacggttaatgccgatttcatcagcgaaaagaaactttgcagcttcgctttctgattgaccgggtaaagctcctgcagagaaagatgatgaaaatgcccgaacagcgggagaagctgtattcccgtaataaagacggtaaatacggttaaagccgccgttatccacggattggcggaaacgagcataataatcaggataaaaataatcgtgagcctgacctgaatgccaagataatcatttgaacgcagaaaggcccgcgcatacatataggagaacgttttccgctgttcgaacggaatcattctgagcaaaaagtcgagatacgcccggcgttttgcctgttttttcaggtgaggcacatcggtaaacagattggcgattctgtaaaaccgctgcttccttcttaattcatattcaatatgagcttcccattttaatgatttatgttttgcggccgatgtgaaatacacataaaggccggccatcacaatgtagacggcggcagcgtacacataaaacgactgtaagacgaagtataaaagcagcatattgcagataaagcgtatgaccgcatccatcattttcatgcttctgtcattcataaacgtcatccgccactccatggcctgattccacgcttttaccgccagcatctgaataaatacggcggcatacgacgcaagcgacgcccccggacttacagcgaaaaacaggggcatgcatacaagcgacagagcaataagcggaaacagctgtgacagatagctgtacttaaatgaatgcttaaagtatgtccccattttcggttcaagcggcagcagaaacacgaggtccgcttcctttaacagcgtccggacgtatgaaccggtcagcacaaatgaaaagagcaccgccatcacccaaaatgacggaaaatgaacgggaatgtctttgacccacttgctgtaccagcttgccgcgccggcaataaaaaagatcagcacaatgacgagatgatcattgagcatatatttcatatacattctggtttcctttatatgctcttcaagccgggactgccaaatcgtagacatattattcatggccggcgtcttccttcgtcagttcgatatacaagtcatcaagagctgcgtctttcatgccgaactgctctctcagttcttccagtgtgccgcttgcccgcacttcgccgttatgtaaaataatgaaagcgtcacagtagcgctctgccgtagccaggatatgcgttgacatcagcacgcttgatccggcttttttcgcggcgtccatccgctccagcaatgcattgatcgcaagcggatcaaggccgagaaacggctcgtcaatgatataaagcgaaggctccgcgagaaacgcgcacatgatcatgactttctgcttcatccctttagaaaagtgagcgggaaaccatttcagccttttttccattctgaattctttcagaagcggaggaagccttttttcaagcgtttctttggaaaggccgtacgccatggccgtcagctccagatgctctttgagcgtcagttcttcatacagcaccggcgtttcggggatgtacgtaaattgcgagcggtagctttccttatcctccgaaaacgtcttgccgttcagctcgatcgagcctttatgcgggtccattaatccgataatatgccggatcgtcgtgcttttgcccgcgccgtttaatccgatgagtccgacaatctggttcggctcaagggtgaatgaaacattttttaagaccgggtttctcgtataaccgccggttaagtcttttaccgatagcagagacataatttctccccttctgattcgtttttcttcatagtaccaaaaataaagtctgatttgaaacgattccctttttttctcacgtgaaaagtgtgcatagttatcgttttggcggacatcataatgtatgtagaaggaaacagctttaatcaactgaaaatgaggtgtttataaaagacgtcttagaacagttggatgaaaatcaacatgtcctgtgcttacaatttcttcacacactgctttgatgatgttcttcattcatgatgaaataatcaaatgaggtgtttgtcccaggaatgattaagcagacccataagtcttcattttaaaaacaaatgaggtgcttacaaaaggcatattcaattttctgtgataaagctcgaccttctgcatcagggtgaacgcgcagccgttcatcctgttttttgttttggccgtttttgtggtacgatgagaatatacatatatttcttttcagggaggaaacccatctatgcacaaagcggacgattgtattttctgcaaaatcattgccggtgacattccgtcttcaaaagtatacgaaaatgaacacgtcgtggcgtttcttgatatcagccaggtcacaaaaggccatacgctcgtgatcccgaaaacacatatcgaaaacgtgtacgagtttacgcctgagctttctaaagaatattttgaagcggtgccgaaaatcgcacgcgccatccgcgatgaattcgagccgatcgggctgaatattctcaataacaacggtgaaaaagcgggccaatcggtgttccattttcacatgcatatcattccgcgttacggaaaaggcgacggtttcggggctgtctggaagacccacgccgaagactatacgcctgacgatcttcaggagatcgcttcaaccgtcagaaaacggcttgcctcatcttaaagatgaggtttttttgcgtccggaaacacaaaaaacataaattatatttttttatatcaaaaaaatcaaaaaattgtgataggataattgtattatttcttacactaaagcggaaaacagggagagatcgtaaacatggaacgtacaacgaatttcaatgcaggacccgcagcccttccactggatgtgctgcaaaaagcacaaaaagaatttgtcaacttcaaggataccggcatgtccgtcatggagctgtcccaccggagcacggaatatgatgcggtgcaccaaaaagcaaaaagccttctgaaagaactgatggatattcccgacaattatgatattttatttcttcaaggcggcgcaagccttcaattctccatgctgccgatgaactttttaacgccggaaaaaacggcgcacttcatcgtaacgggcgcatggtctgaaaaagcactcgccgaggcgaaactgttcggaaacacatccgtcacggcaacaagcgcagattcaaaccacaaccacataccggaagcggacctctcaggaatcaaagacggcgcctacctgcatattacgtcaaacaacacgattttcggaacgcagtggaaagagttcccgaattcaccgatcccgctcgtagccgacatgtcaagcgacatcctgagcagaaaaattgatgtcaaaacgtttgatgtcatctatggcggagcccagaaaaacctcgggccgtccggcgtcacggtcgtcatcatgaaaaaatcatggcttgaaaacgaaaacgccaacgtccctaaaatgttgaaatactccactcacacaaaagccgattcactgtataatacgccgcctacatttgcgatttatatgctgagcctcgtccttgaatggctggctgaaaacggcggtgtcgaagcggctgaacggcgcaatcaggaaaaggccgatgtcctgtacggcacaatcgacgcaagcggcgggttttacgcggggcatgccgcaaaagacagccgttctcacatgaacgtcacgttcaccctccgcgacagcagtctcacgaaaaaattcgttgaagaagcgaaagcggctaaaatgaccggactcggaggccaccgctcagtcggaggctgcagggcgtctatctacaacgccgtcagcctggctgattgtgaaaaactggctcagtttatgagaaagttccagcaggaaaacgaataaatttcttctaacataacggttcctttgatatactgtttgcatatcaatttttccggccatcgcaataaatgacgagcatattattggatggcgaaaaagcttagcagaggagagcttagtatgaaaacaaaagaattagtcactatggccctgtttgcggcaatcggagcggtgcttcattccattatgccgccggtattattcggaatgaaacccgatatgatgcttgtgatgatgtttatgggtattctgttattcccccgtgtgcagaacgtgctgatgattgggattgtaacgggaatcatttccgcactcacgacatcttttccgggcggacagcttccgaatatcattgaaaaaccggtaacggcgtttctgtttctctcgctggcgcttttggtgaaaaagagcgtgaaaacagcggccgccgccgtcattacgatagccggcaccttcatctccggtttgctctttttggcgctggcccttctgattgtcggcctgccgggcggattcaccgcattggtgctcgcggtcgtccttccggcggctgcgctgaatacgatcgccattatcattatgcatccgattgtgcagacgatcttaaaacggtccaatatgattgaaacggtgaaataaccgcataccgaaacctcttccggccggaagaggttttttaatgtgtttcagcatgttttatacgagaagttttgtgaaaaagataaggaacaatgcgagggcggttcctgctgagcagacaatggccttttggcggacgacccgcttcggcggataagaagcggcctggccgagcagtttcaggtaataaacggcgcccgccgcaaagacaagagccatacaagataaaacaatcataaagacagacaaccttctccctccttttcccttaaaaaatatgctaaaataaagcaagctatgtatagaagtttattcttctgaacaaaaatgataaaagttatgagaaaaaaaacggggtgatttcaaatggctgacggacgttcccttttaacaggccttttcgtaggcggattgatcggaggcgcagcggtgttactctcggctccttcatccggaaaagagctgcggggcaaaatcaaagcgaattgcaattcaattgaggacacaatcaaacggttaaaaaaagacggaatggcgcttaaggaccagcttgtccaaacggcgaaagaaagcgcagaagtcattaaagacgtaggcggagagcttcagaccagcattaaaaggtggcaggaggaaatcaaaccgcaccagcaggatctccagaaggaaatcgctgatattgaagagaaaatcagacagctggagaaaaccttacaaaactaatatcctatacaaccaaaaaaagtgcggacatattgcgttccgcacttttttttgcggtttaaagcctttcccagcaacggatgaagaatttattataaaattcttaaattttcatctttattaatctttattttattggcataatagaggaaaagaaaatgtgaagcaggtgatctgtattgaatcgtgttgaaccgccttacgatctaaaagaagctttaatctatacccaaaaaatggcgcagctgtccaaagcgctgtggaaatctatcgagaaagactggcagaattggctgaagccgtacgaccttaatattaatgagcatcatatattatggattgcctatcagcttaaaggagcttctatttcagaaatcgccaaattcggcgttatgcacgtatcaactgcatttaacttttcaaaaaagcttgaagaacggggatatctgaaattttccaagcggctgaatgataaacggaacacgtacattcagttaacagaagaaggggaaaatgtattcgaaagcctgcttgaggagtttgatccgtcgagaaacgctgtgtttaaaggctcacagccgatctaccacttattcgggaagtttcctgaggttgaagaattaacctgtgtcatccgccacatttacggcgaagattttatggagatattcgagaaatcattgacaaacataaacaatgattttgatagtgaagacggaaggctgaagaaaaaaacggacgaatcggctgtccatgaaacggctgaagagctggaaccgatcaacagttaatcaaagtgcttcataatctcaataaattcttccatcagcgctgtataaagcccctgctcatacagagcaaaaatcgtttcatgaacatctaatttttcgttcagctgtcccgcaaaaagcgcaaggagcttgtcaaacgtcacaaagccttgcgctttttgcgactccagctcgtcctccaattcgcggcagatccgcccgacctcttctccttcttcttcggtcagccctttttcaatcatcatcgcataaaaagggtacttatccatatccaccgttttcaccagcaattgtatgtaatattctaaacgcccgatacgctgatccattgaatccatccgtttcacttctttctatctttaatcttattttagctgataatgaatggagaagaaaggttaaaccgtacatttccatgtttcaccgagctcttctgttcttctctttccaggtttatttttttctttaaaaaaggattgattttttctcctgaagagagtaaattattttgagattgtattccatctttgtacggaaggatgactctgatgaattgctggaaaaccattaatctgatcaaagattatggtgcggttcgtttattattgactgctgtaggttttatgatcctgttttttatatgcaacttcttggcattcgggctgctgcgtccgaatatcagtttaagtgacgggcacgtgtttgctttttgtgttctgctcgttgttactttatttgtacataaagtcatacatgtcctgccgatgatctgtaaaaaaagaaaaaaggaaatgaaaatgtacttcttgcggatgccgacatggaaaggcataccgaaaacgacgatgctgatttcaacgatcagcccgtttttattcattacgccgttattgttttatgccggactggcatttccgagacacgctcattacttttatatgatttcgagcatccatgcggggtattgcctgcctgatcttctgtttgccctgcatctggtcaaagcgcccaaatcatgtctgattgaccaggaatccgacggttttgatattttagtaaaaaaagtgccggagtcttgatgtcccgctgatttttcaggttacattctatcttttttaataaatatttggtaatgtaatatgggagcagttcagagagagggggaatctcccatcattttattctattttatcgtggctgccctgtttattctttatttcataaacaggctcacaaatacattatgccttgtcagagagattcctgaagaccggcaggataaggtattccgttttattaatgtatctattttaattttactgatctcttcattcgtcgagatctcctttactgtgtaaacaggcaaaaaaatatggctgacggaggtctgacccccgacagccatatttttttcttaataaagccaagaagcgccgatgatgatcaataagatgaacagaacaaccaataatgcaaaaccgcctgcaaatacttcacccatctccaaaagcacctcctacaaaacgttttatttttccaattacatcatatgcaatttacttctgaaacgattaggcgcccgggtaagaaaacggaccgcttttagaaaaagcgatccgtttcgcttaacaaatgtaagctgcacctacgatgataagcaatatgaacagtactacgagcagtgcgaaaccgtttgaatatcctccgcccatggttcattacctccttttcatgatcaatatatttgtatgtatcaggaaaaagtttgactagacgaatgccctttatttaaaatctttttacagaaagccacaatatgttatgatacgcatatgcaatttaatttggatgattaggagtgtttaaaggaatgaagaaaatcgcgatagcagctattacggcaacgagcgtcctggctctcagcgcttgcagcagcggcgacaacgacgtgattgccaagacggatgccggaaatgtaacaaaaggcgagctctacacgaacatgaaaaaaaccgcgggcgcaagtgtgctgacacagctcgtacaagaaaaagtattagcaaaaaaatacaaagtaacggataaagaaatcgataccaagctgaaagagtacaaaacgcagctcggcgatcagtacagctcccttaaacagcagtacggcgaagattacctgaaagatcaggtgaagtacgaactgcttgcacaaaaagcggcgaaagacaacatcaaagtgactgactccgatacgaaagaatattacgacggcttaaaaggtaaaatccgcgcgagccacatccttgtcgctgacaaaaagacagctgacgaagtggagaaaaagctgaaaaaaggcgagaagtttgaaacgcttgcgaaagaatattcaactgacagctcaaaagacaacggcggcgaccttggctggttcgataaaaagtcaatggatgaaacattcagcaaagctgcattcggcctgaaagtcggacaagtcagcgatccggtcaaaacaaaattcggttatcatatcatcaaaaagacagaagaacgcggcaaatatgatgacatgaaaaaagaactgaaagaagaagttcttaaacagaaattaaacgacaactcagctgtacaggcggcaattcaaaaagtcatgaaaaaagctgacgtaaaagtggaagacaaagacttaaaagacacgtttaacacttcaacttcttctgaatctaaataaaaaaactgtgcgggctctcggcgagccgcacagtttttttatgcgatggaatgattggagttttcttccgcatccccgttttcacttgcgggcgccgccatacggcgctcgcgttcctgttccatccgttcaatatacacccttccttctttttcaataaacgactggtcaagcttttcctcttctttagctgttgtgaaaagcttataagcgctgaaaataattccgataatgcaaaggtatacccaccaaggaaaaaatagcacgtcggtttcctccctttttcacccagagtctttattctaagctatgcttgataaagacaagttatgagagctgaacgtaaaaaagaccgatcatagagaatcggcctttttatcttattgatggaaagtcggtttgtagaaagaacggttttcaagcgcaaatacacgctctgtgtattcgcccggcttcacccgttccagcgctctgtccatcatgatcatttttgcatccagattatcaatgtagtgcagaatttccgcttctttcaccatcggcggtttcgggcttccccattccgcttttccgtgatggcttaaaatcaaatgcttcagaatcagcacttcttcagcgtcaatttgaagctcttcggctgcttttgaaagctctgtcaccatgatcgaaatgtgcccgagcagattcccttccacggtgtacgttgtggagacggggcctgaaagctcttttactttgccgagatcatgcagaatgactccggcatacagtaaatcccggtcaagagacggatacagatcggcaatcgcttttgccaggttcagcatggacactacatgatacgcgagccctgaaacgaactcatggtggtttttagccgcagccgggtaatccataaactcagccgcatattttttgaccagatgtcttgtgacccgctggatgtttggatttttcatttcaaaaatgtattgagtgacggtttccatcatttcgtttttcggaatcggcgccgtttccagaaaatcatcaatgctgacattttcattctcaccggccggccggatgtttctcagcttaagctggtttcgtccgcgatagtgatggacatctccgatcaccttcacgatcgtctgcgccgcgtacgttacttcatcagtcggcttggcatcccacagcttcgcttcgatatctcccgattggtcctgcagcattaacgtcaggaatggttttccattgcttgcgattcctttagtcgaagatttaatcagaaagtattgatcgacctgctcgccgacctcgtgcagcataataccttttgccattctattaaaagctccctccatatcttacataataccagtatagcacatacctcttttttgaaaataaactcttttatgacaggagccgcatgacttgtccgctgtgaaaagaccggctgacatgctcatggcaggtgaaataaagtatctgccgcccgccttctgaaagctgattcagcacatcaaacagccgctgcagccgctgcctgtcaaaatggacaaaactgtcatcaagtaaaaacggcagtgataccgcagattccctctctgacgcaagggcaaaacgaatcgccgcataaagctgctcgcatgccgcctgtgacagttcgcctgcagaaaacaccgttccgtctttccgcatgaccataatggaatcatcagcctcggaaaaatacaatttgtgatagcgtccgtccgtaagcggcccgtataatgcaccggcggtttctaacagacggggaagcgtcacttttttatgccgctccattttttccctgataatgtgtctgaccgtctgtaatgcggcccactctttagcggtttttttcacgcgctccttctgcatttctgtctgctgttttaaatcggatacaagccccgaggactccaactgctcttgcttcaccgttaataaagcggtttgctcacggagctgggcgcttttttcctcaagcgtttttttctctgtttccttctgaacgactgtatgttcaagttcggacactgtgcggctcatgtacggctccagctgttttccgcctatgccggacaagtgcgttttgatttcgcgcagctgccgctctgtttcccggcggctttcattcagcctggcgagttcacaaaagtgttcgcggttttttgcgcctgccgccatgaaaagctgtttgacctgctgttcgtagtaatgaacttcttcgtttaattcacgcatttgctcttgtgcatgcagcagatccatttcgagcgcctgctttcgttttgcttcctcacgggcccgttccgcctgcgccagcaaaacgtgcagtctttcttttacggacagctcccttccgtctgaaggactcagctttttgacccggtcctcaaatgctctttgcagcttttgcagcctgcccgcttcaatggtcagctcatgcttgttaaggatttcttttttgacatctttcatcacatgatatgcgtcaagaagatgggaaggacttcctgaaaaccccagttccttcataaaaagttccgcctgtttttcagacggcgccatttcggcctcccattcttcatattggcggatgactctttcatatgccgcttctttctgttcaagcacggcttgatccgcaatcagctgctgccggtgccggccgtcacgccaaagctcttcctgcagaagatcagccgcttctttagagatcgccggcttctttttcttgtgtccgggccctcctctttctgacggcagcggtttttgcatgccggacagcatatacagcagcagagcaccggtaaaaagggcggcgggcagccattcctttaacatagcgaaaatcgcaatgaacagaatgcccgcaccgagaaagagctttttttgtttggcgcgctgtttttccagatgctgaacatgtgcctgccattcgtttccttctgtatcagccgtttgcttatatgattgtaaagcggcttctttttctttcttgacagcggggtccaaaatgttttccgccgtcacggcatgttttcgttcggcttcttccagctccagccgcgcttgttcgaaaatcgcatcaagctgtgtctttctttctctagcctgtccggcgctctgcacggcttcctgcagccgccattcatattcataatcggtgttcagtgaaagaatgccgtcttcctcatgtcttccgagctgctgcaatcctgacgaaacgcgggcagatgtctgccggatctgtgattggatggctgcaagctgttcgccgcgcgattcatacatatgctgctcgccggaaagctcctgcagctgccgctctttttgcagcaagtcctcatttggagcgagcagatcagcctgccgcctgagttcagccgcttttgcccgaagcccctcaagacgggccgctttcggatggagatgcgattcgtatttttcaagctgatgcattccgtccttcgggaattgcttcaatgcttccggataagaagaaagttcgctttccaaggctgtttttttgtctgcgagcggctttgcttctatcgccgattttactgttttgatttcttcagttatgtctttcaatcgtgcttcggcatcctgcaaacggccgccggcgctttttttctcttccagaaggctgtgatagcccgcttccgcagcttccgcctgtttcagctgggcgctgagccgctttaatgtatccaactcctgatttaagcgggggttccgcccgttcggcttatacatcctgtcaagttcttttgccagccgcccgtcaagctttgccgccgcttccgacccgaataagctcgaatacaggagaaactcgccgattttgtcccggttaaaagcttgaatctcctgcagtccgaatacatcgaacgaatagatcgcttcgtacagcgcccggtctgtatcggagagaagctgtttgagccattctccgtccttgatttcgcctgaagccgtatacactctgactttttcggcagcgccttttgtccgttcgattttgacagcgccgtgatcgccatgcttcaattccacagtgccgccgtaaaccccgccgtttttcggttcgtatttttttgatttcggaaaaccgaacagcacgcttttgataaaggacatcaatgtcgttttgcccgcttcatttaacccgtagatcacttgcacgggagaatctgacagctgaaaacttcggtcggaaaattttccgtattggtaaatatgcatcgccgttattttcatcgctgaagctccttcatctggcgtcttaaaacggcttgagcctgccgcttaatatccagtatctcttcatctgtaaatgaagccatctgacgccggtatacgggatgacgctcaagggcatcaaatacaccgctcatatccgcgcattgttctatgtcctgaaggagccctttaaaaaacggatcgagcggcacggtttctgtttcatccgtccgatcctcaagcgcaagcggccagacgaaacattcctcttcggcctcttcctcctgtaaagcggaaagaagctcctccgcgatgcctgcgggcgcctccgtccaaaagcggggcgctgcgccgcgaagcaccagcctgacacatgccgggcggcccgccgcgcgcaagccggagaatgtatctgatgcggctttcagaagtgaagtcatatgttcagctccggagatatcaagatcaatttcctcccataacacatcatgcgcttctttgaattcccaagacatctcaccgtttgccgcccggacgagataatatcccttaggtccggtttcttttaaatgccgggcttgaatattcccggggtaaatggcggcgggatgctgggcggacaggacctgccgtttatgaatgtgtccgagcgcccagtaatccatgccgcttttttcaaggtcttctttcgtaaacgggcagtacgggtcatgcccttccgctcctgataacatgccgtggagcatgccgatatgataaggcgcgccggtcattttccggtaacgggccgcctgattgaccgttacgcttctttcctgatagctgcatccgtatatgcttgccgcaagctctccgtttttaaagaaagatttttcctccggtgtatccgaggtgaatgtatgtacattttcaggccattcaatcggcgtccacttaccgcccaaatgatcatggttgccgaatatgacgaacacttggatatccgcttcctgtaatctcgtaaactgttttctcaaaaacagctgggcttttaaacttctgttggcttcgtcaaacagatcccccgaaagcagcacgaaatctgcctgctcccggagtgccccgtccgtcagtcggcggacgctgtgaaatgtgctttctttaatacgcgcatataccggttcaggcagattcgaaatgccgtaaaacgggctgtccagatgcaggtcagcggcatgaataaacgtcagatcagccatctcgccctcccctttctgcaaattgaattacccttattttagcaccgtttttatacgaatgcacgttctgtaaaataaaaaaacagcccggctgttccgggctgtttcacttattttttggagatgcgcagcgcttgtttgatcgctttgaatccgctggcgtttccgtaaatcaaaacgccgcctttgtaaattttcgcgccgaccgctgcaaagatcacgatagtgaccagtgtcagggtgattccggccgcagcctgccaaaacgggatatcgagcatcccgacgcgtaaaaacataatcatcggcgtgaaaaacggaatgtaagatgtaacggtaataaaaccggcgtcaggattgccgatgccgaacatggcgatcataaaacctgccacgactaaaaaaaccatcggctgaatcgtctgctgtacgtcctctatccggctgacaacactgccgagaaacgcggcaagcgtcgcgtaaagaaaatagccgagcaaatagaaaatgacagcatagactatcgtcgagacgggaacatccgtaaaattgagaaatgcactgatcggcgacgacgcatcattttgagggttcagcttcagtgagagataaccagccgcaatcagcaccgcaaactgtgtgatccccacgagcgcgataccgaacagtttggcaaacatctgctgaatcggcggcatgcttgaaattaaaatttccatgacgcgggacgatttttccgtcgccacttccatcgcaatcatgcttgcgtacatgataactgagaagtagatgacaaacagcatgatgtatacaagccccattacctgaccgagctcttcctcggatttcgcccctttttccagcgcgtctttgctgacttccggcggagtgtagaggctgctgactttttctgccgaaatgccgagcttggcggtttcaacagcggtttttgtctgggttaaagcctgcttgagcagtttatacgctgattcatcagaaatggtcagcgccttgtatgctcctgttatcgttcctttttgatcttgtctgatgataaacagtccgtcccattcaccgtctttgacacgctttacggcatctttttcggactccttcgtctccattgcctgcagatcattgtctgtatccgccgctttaagctgttttgcaaacgccgggtacagcccgcccgtttcatcaatcaccgcgatttgctgcttgccgtcatccgattgaaacacggatataatcgattgcaggttggtcaccgctaatactaataaaacggtaatggcggtcgaaataatgaatgactttgtcgcgattttgtttttatatgtatgaaacagcataatccaaaatttattcatatacggcccccaccttttctataaaaatatcatgcagtgacggctcttccaattcgaacttccgtataaaacctttcccttgcagcgcccggaaaatatcctgagaaaccggttcattcgcgacctgcagtctgattccgtcatttgtttccttccatttcacgacgccttcatgcgtttttaaaaagctgaggtcatcatctgaatgaacggtgacattttttttgccgaaagaccgcttaatgtctttcagattgccttgaacgacgggttttcccttctggagaatgcacaaattctcacaaagctcttccacatgctccattcggtggcttgaaaaaacgatggaaacgccgctgtttttcaaagaaatgaccgcttctttcagcagctcgacattcaccggatcaagaccgctgaaaggttcatcgagaatcagcagttcaggcttatgcaggacggccgaaatgaactggattttctgctggtttccttttgacagctcttctactttcttattcttgtaatctgtaatgccgaaccgctcgagccatgtcatgagctctttttccgcctcttttttgctcattccttttaatctcgccagatagacaagctggtcactcaccttcactttcggatacagcccccgctcttccgggagatagccgattttttcactgatggaataattgaccggcttccctttccaggtgatatgcccgtcagtcaggcttaaaagacctaaaatcatccgaaaggtcgtcgtttttcccgcgccgtttgcgccgagcagcccgaacatttccctttcaggtatttgcaggttcaaattgtcaacagcggtaaagctgccgaatgttttcgttacgttttcaattgtaagcacgaatccaactccttccttgacccattatatactaataatgggtaaaaattaatggaggattttaaattctttatcagaatatcattctataaagggggtgacatgatgggacaatatgtattgaccgcattccatgcgtcgggagaaacgctgctgaatgaacggatcgaagcggataatgaggcggaggcgaaggccgccggagaggctttattgaaggaaaaaaagcttgagaacagtactcatcgcttggtaaatgaagccggaaagctgattttattccacagataacagaagctttccggcttctgtatgttaccggttaaattgcggcgtccgtttttctaaaaaggcgcggatgccctctttatgatcatccgtttttctcatattttcctgggcctttcgttcaagagacaaaacgtcttttaaccggctgatatggaggctctgataaatagccttcgtttcaatcatcgctgacagcggcgcatgcagcaatcggtcgatatacggttgggccccctccgcagggccgccgctgaacagcccgtcggcaagcttgagccgcaccgctttttcagccggcaatttttcaccgctccaaatcagttttttcgcttcgatctcaccgacgcgtctcattaataaataatggcctcctccatcgggaaccaatccgatgccgatgaaattcatcgcgaggcgggcgttttcttcggcgagcaccacatcggcgcacagcgcgaaactcagcccgagccccgccgcggctccgtggatggcggctatcacaatttttttcatatcatagagcgtcagcgtaatggattcgatcattttcatgagccgttcatattctcccgaatcatgatccgacgtcatcatctgaatatcaccgcccgcggaaaatccccggccttccccccgcaagaggacgataagcgcttcgctgtcggctgccatcacgcatgcgttttccaattcccggagcatttgttcattcagcgcgttgtaactgtcaggccggttcagcacaatctctgcgatctttcccttttcttcataacgaatatactgcatgtttacaccctccttgtatccgcttacatattttgttcaaatgatatattccttccgccgaagcgaaactcctttatttttcaaggtcaatagataccgaaaaatgcatatcatttgaaactgaacatacatttttatatagtgaaattgatatacaaaacaaaagggggaaaaacgccgataatgaaatatgtgatactcagcttgttactgagcttttttatggtgctgttccccccttcggatgtcgctcttccttcccaattggtgacagaaacagacagccatgtacaaatttcggtttacccgcaggaaacggattcggcaaagacgccggttcacaccaaaaccgctccgcaaggcctgtcaaaaggatacggtgcgttatcccggatgatctccctgttatctgtcaaacctcttgatcaattcattgattccacaatggaaaggacatgcgccattccgatacaataccagtcaaattacctccggcatcagaccatttctcattgccaatctgtatttacggtgtaaaaacagtatattccggagggattttttatgaatattaaagaaaacgatctgcccggcatcgggaaaaaattcgaaatcgaaacgagaaatcatgaaaaaatgacgatcatcattcatgatgacggcaggcgggaaatttacagatttgatgaccgcgaccctgatgagcttctggcaagcatttcacttgatgatgcggaagcaagacagattgccgcgattatcggcggtatggtgtataaaccgcaggcgcttgaatcgattgaaatggcgttcaacgatctgattatcgaatggtttaaagttgaaaaaggggcaaaagcggcagggcggacgctcggcgaactggatgtgcggcagaactatgacgtgacggtcatcgccatcattaagcataaccggaaaaagcttttaaacccgggcgctgattcgctccttgaagcaaacgatacactcgtcctctcaggtgaaagaaagcatctgaaaaagctgatccaagacttcctctccagagacggagtgtgatctgtttatggaccatctcgtatttgaagtcggtacggcgttagttcttgtagccattgcgagtgtcatcgccaataaaattaaattctcgatcatccccttcctgatcattttaggaatgcttgtcgggccgcacgcgccccaagcgggcatcattgacctgacgtttatcgaaagccgggaagtgattgaatttttcggacggatgggcgtcctgttcctcctcttttacctcgggcttgaattctcggtcggaaaattagtcaaatccggacgttcaatcgccgccggcggaacgatttatattctgattaatttcagtttagggctgatctacggctttatcacgggcttttcctttttggaagtgcttgtattggcgggcgtcatcacgatatcatcaagcgccattgtcgcaaaggtgcttgtcgacttaaagcgcacggccaatccggaaacggagctgattctcggcatcattatgtttgaggatatctttctggcggtttacttatccgtcgtttccgggcttgttctgggagacgcgacgtctgtcggaggcgcgctgatgtcaatcgtgatcgctttcggatatatgctgctgtttttcattgccgctcgaaaattgccgcctctgctgaacaagctgcttgatatccgttcaaacgaggtatttgtcatcgtcattttcgccgcgctctttttcattgccggcttttccgaaacgattcatgtcgctgaagcgatcggcgcgctcttgctcggactcgtgttttcggagacggcccattctgacaggattgagcatcttgtcgtgccgttccgtgactttttcggggccatgtttttcttcagcttcggtctgagcattgatccgttttcactcggagatgcggtatggcttgccctcggcgccgttctgctgacgattgccggaaactttatcgccggcatgatcgccgggcgccgggcggggctttctcataaagcatcgtctaatatcgggctgaccattgtgtcacgcggcgaattctccattatcgtcgcaaatctcggcatcgccggcggcctgtccgcttcacttaaacctttcgccgccttatatgttttgatactggccatcttcggccctttgctcacgaaagaatcgaagcggatatatctcctgttgaacagcgtgttcaaatggaagacgcctgaaaagaagccgcagaaatcataaaaaaaagctgacctcttcataaggggtcagtttttttgagcgggaagaaattgctgaaaagccgtttttttattaatggagaaatgctcttttcccagaatggtattgatgattttttggtttctgtaaacagacagcttcaaattcgtagcgcccgttccgtgagcatgatcaagattcgttaatgtgaaaaaatgatgccgcctgtcgtccttaaagacaagacgggaatcggccgtcactttaaagcgtttctcatcctcccattcgatatcgggggcaattgccgtaaaccattccggaatatgaggtttaaagccggtcgccaaaatcactttttctgaatcggccgtaaaggtttcatccatctgccattgatgaaagctcagtacgcagcgcccgttttgcttttcaattttttcaagctccgccatcggctgaatatacacgtcaggcgaacctccgctgatcgatctgtgatacagggcatcgtaaatggcggcaagtgtgtcagaatcaatgccgtggcgcagtccgtccagctcagggagtgtgttcagccgttctttaaaaggcaggcggttaaaatattccacataatcaggtgtaaacatttcctgtccgagcttggcggtttccaattctcggaatccggcggagcgtgtcacccattgcagccggctgcggcggtattgttcatcgtgcaataagtcagaaaagatctccgcggcgctctgtccggagccgaccactgtaattgattcggcgctggcgagctcgtctttccgaaacaaatattccgtgctgaccatcgtgtcctgacgcgcttcgtcagcaatctctgcgggaataagcggttcagcccccgttcccatgacgaaatgcttcgtttgatagacactgatgcttccgtcctcaatgttcttgacgctgacgtcataatgtccgccggcatttttcacgccgattacctctgagccgaaacggcatgatttgatttctgaagccgcccagctcaaatagtcgttaaattcccgtctcggaatatcaaattcattaaacgtataaaaccggtacagccggtcatgttcatggagaaagtttaaaaacgtgtagcggcttttcggatcggcgagcgtgaccaggtccgccagaaacgccacctgtaaatccgtccctttaattaatagaccgggatgccacgcaaattctttctttttatcgaaaaaaagagcgtctgttccgggtatatcctctaacaatgcggcaagccctaaattaaacggcccgattcccgctcctatgacatcatacatattatgcacctcttgcgaataacagtctgatggtcttttcccgtttttacagacggttaaacataaaaaaacggcacgctgattccgtgccgtttttgatattataatgcagatttgacgaacatctcatctaagtatttgattttctcttctgtataatgctcgaatcggtcattatatgatttcgggtctttcggattggcgaagtgcgtgatttttccggtttccggatgaatgaatttgcttgccgcgccgcagccgataccgataatcgtctgcacttcttccataatcataatgttgtagatgctttcctggccagggaaggagtagccgacattttcaaggtttccgagaatgtttttctgccggtacaagtagtacggcgtatagccgtgctcttttgtccagcggacggcgtcatccatcatgcgggacacttcctgtctgtcggcaactttatacttatgcttgtttctcgtcatttctgacgcccgtttaaaagaaagcgtatgaacggtcaaagattcaggcatcagcttttccgtttcctcaagactgtgcctgaactcagccgtcccttctcccggcaggccgatgatcaggtccatgttgatgttgttcatgccgtgtttgcgggaaagatggtatttttcgatggtttcttcaactgtatgatgtctgccgatggccttaagcgtttcgttttcataagattgcgggttgatgctgattctgtcaatcttatacttatttaaaacggccagcttttcctccgtaatcgtgtcgggtcggcccgcttcaacggtaatctccctgatatccgcgacatccgggaaagagcggaccatttcttcatataaaagatccatttcctcagcggtaatgcttgtcggcgtgccgccgccgaaataaatggtcgtcactttgatatcatgccgcttcagccattctccgattttctgcatttcatagtgaagcccccataaaaaggagccgactcttcccgcctgtccttgaatggcataagccggaaacgtgcagtaggcgcatttcgtcgggcagaacgggatgccgatatatatgctgacttcatctttgacccggtacagatcgggaaccgcagcgagctggcggtcgacgatctcctgcatcagattgattttttcatcatggatcagataatcttttttcagatcggcgtgcgcctcttcttttgtcaggccgctctgcagctttttatgaagaagtttagtaggcctgatgccggttaagattccccatttttgtgtcatgcccgtatgcgattgaagaagatttaagtagacgtacgacagcgtgtttttcacctgtttaaatacttctttttcgctccatccggcaagaagcggtttcgtatgatgttccttttcgccggttcctttgatttctccggataccgacacgctgtctgcatcttgagaaatggcaagtgagatgacgagatcagagggttcctccgtttcgccgtacgcaagaacacactcttcaaaaaataaattcgcgatgttttgcagcggacgatgcagcctgtcatccgtgatgccgtctatttttatttgcaatgtgatcaccttatttttcagattcaaaactttctttagtgtacagaaagaacaggctaaaatcaatccgcgaaaaagccgcagaccggcgtttcgcgtctgcggctcttgattacggccgtttcatatggaacttatcgagaaagcctttgcggtgctgcatgcggaaatattccttaatcatataggcgactccctgttcatcatttgaccttgtcacccaatccgcttttctttttaattcatttgaggcattccccatcgcgacgccgagaccggccagctcgatcatcggcagatcatcttcctgatggccgatagccacaacctcttccattgaaagcccgagatcagcggcgaccatcgaaagtccgctttcttttgaaacccctttaggcacgatgttcagtttttctccgttgacgcggatcacatcgacggccgggaatgctttcattatcgtatccgttatatcagcctgcaggccatcttcggcatgcacttcaatgacgggcgctgaaaccggctcatcaaggagcaggtcacttaatgattcgacaaactgcaccggataaaaaatcgggtcagacggatgaatcatcgttttcccgaccagattggagttcactttcttcttgtttccgatcgaatatttttcgtgaagaagccggatattacatggatagctttccagcacctgaacaatattaaacgtgtgatcttctgatattttcttttcaaaaaacggctcatctattttttcagaaatgtatgcgccgctgtgggtaatcaattttgcattcagctttaatattttcgccactttttgagcagagcgaaaatggcggtttgtgaccagtgtgacgtaaattccttttttcttgacgtattcgatggcatcctttgtcgtctgatgaagtttgccgttggagcgaagaagcgctccgtctatatttaacgccagcatttgttttgacacagagaagtccccctccttgatgactgtacttgtcattaggatatgaccctgtctctttgtttagaacaaccttttctccgcagcaaaaaagcctgcctcaagcagactttgaactgtcgttttgttgggatacgatcgatttgctgccttctccccaatgtgtatttctatttacgaaatatatcaggaaccccttatttgaccgttgatgcgctcgtttcacttactctctgttgctaccccttatcataccaggcagtataggcgaccgtatccttagatcatctgtaagtgtaggcgctttcagagttattatctcaattatattgttaaaaaacaagggtttttttaactaaaaaaatcagaggaaatatctatgctgaatgtatgataaagttgcaagggaacatacattctcatataataaaagaaaaaaagcggtgactgtcatgtctctattaaaagatatttataacgaagaatttgcagaagcacttctgaacagaatcaaatcggcatatccggcttttgagcgggacaagtgccgggcgctgatgtttcaggaagattggcccggactgacgttaaaacagcggatgcgccggatcacagactctttatatgaaacactgccgaaggattacatacgggcgcttgacgtcttatatgagacagctccccgcttctcagggctcgccgggattatttttcccgattatgtccaacagtacggaacggatcactgggacgaatcaatgaaggcgcttcagtatttcactcgtttttccacttccgaatttgcggtccgcccgtttatcaggcttgaccgggtgcggatgttcaaagagttcctttcctggacggagcatccggacgaacatgtcagaaggcttgccagcgaaggctcaagaccgcgcctgccatggggaatctccattccggctcttcttgaagatccttctccgattctccctgttctggaccgcttgatgaaggatgactcgttatatgtcagaaaaagcgtggcgaataacctgaatgacatctccaaaacacatccggatcttctggcagagatcgcagccgagcggttcggcagctgtccgcacacggactggattttgaagcacgcctgcaggacactgttaaaaagaggagacaaacaggcgcttgcggttttcgggtttgaagacgcctcccggatttcattggaacgttttacactgaattcggaaacggccgccatcggaacaagcatacatttttcttttcagatccgctcatccgcccggcaaaaagtcagggttgaatacgcgattgattttgtaaagaaaagggggcaccgcagccgcaaggtgtttaagatgtcggagtccgccatggataacggagacgtaaaaaccttcagcaaacatcattcccttaaagatttaaccacccgcaagcattatcggggaattcacactctgtctgtcatcattaacggtacggtaaaaggttcgcttgatttttctgttgaataaaaaaacccctccatttcatagatggaggggtgtggagcttattccgggctgccgtaaagctcttcaagaggtttcataatgattttgtttaactcgccgatcagcatgctcatgcgctgttccgcttccatcagctgagaaatcaattcatgctgctgtacgagagcaaccgttttttgtgcctgctctacttcttcctgagtgatttcttcacctgacatctgtttctgctgcagctgcagctgtacattgcggaagttatcaaacatgcgttttgcggattcatctgcgtttacttgatcataaagccctctcagacggctgtattcatcactgtttcgcaaagctttttcaagatcatatgctgcatcataaaaatgaactgccatagtaaccgctcctttcttcctttcggacataccactccactataacagactgcggagcgactttcatcatcggcgtatgttttccttagaaaagaatgacaaacaaagcctgaattgctccgattatcccgccgagcagaccgcctaaatacgttatcatcttaaattctctcttggaaatcgacagcaccatttcctccagccgttcaacgggaaactgatcaacctgctctttgaccacttcctcaagacgcagccgtttcagcacatcctccaaatgagcggcaatactgccgagtgccgcatcaagcagcttcggcgcgtacgttcccgtaatctccccttcataacgggagatgatgtcaccgagccggcattcgaaaaagggcgcggtttgaagtgcggccaaaacccgctttttcatgctgaacagcagatctttcgcattccacttttcatcggcctcataaagtgtataagatttgagcttgccccattcttgagaaagcagatcagccagaagctttttcgtttcctcattgcgcaaaaactttaacagctcaggcagcacacggtctgccaagcttgaattgccgaggaacatctgcaccatgctgccgagcatcccccgggaattcaaaaagtcgtcaatcatatttccgagcctgtctttcccttcttcgctctcaaaataatcaatgctccgcttcagaatataatctgcggccaacgggactttttcatccagcttttcctgaagctcatcaggaagccagtcttttatggcgcggtgctcatatttccggtacagttccgaaagcttttcatcggtaaaacggtcaatccaggcatccgtcttttcctgcggattccggatgcccgcggcggccaaagcttcgtgcaccgtcatctcggaagcggccattttttgtgtgaattgttcggcgaaaagaagcgcctggtttttaacggtatctgataaaagccgcttttttattccttccggggttaaaaggtggttcgtcaccatgagccccatttgttttgccaattcatcccgccttttcgggatcagccccggcgtaaacggaacccgttttccgaacaggtaatacggccggtacggacgaaataacatctgaatggcaagatgattcgtcaccgcgccgatcgcggctccgatcacaatcataaatagaaacgttcctgctatgcccattccttttcttctgcctccatcttatgttctattttcttgatgatatatctattcgtattatagaggctggcgggcatgcgggcaaatgaagaacctgaattgttgtttgtgaggaataaggcaagatgctgtttcgtactctttacagtagatcatcttttataacgcgcttagcatatttattggatggaagggccgttccatcagcggctttttgaataaagggggagtaataatatgacaacactcggttttatgtctgtatcccgccggcacgaggaagattacgccggggaattggctgaaagagcgcctcaatataatgtgcgcttagcccgctttacaccgtttgatatatttccggattctttgcgcgtgaaagcgctcgtctatcacccgcaaagcggaaagtggaacgaaacggaaatcgatattcccgaatatatttacgaccgctgtttttacggaaaatccgctgaagcgcaaaaagccaaaccgatcgtcgaatggctgaaaaaatatccgaaaacggaatttatcggccgggggcttcctgataaatggacggtcacggatgcgctccaaaagcatcatctgatcagtccctatattcctgaaacggccgaagtcagccgctatgaacaggtgcaatcatacttagccaaggaaaaagcatgtatacttaagcccgctttcggcgcgggaggcagaggcatcatcctgcttgaaacaggcaaaaaatcaattacggccacttactatatcggaaaaaacaaacaaacaaaatcattttccaatcacgtgtcttttaagtcttggtgcaaaaaagtgctgcagcaccgctatttgcttcaatcctacttaaatatccaggataaagagcggcatccgtgcgacatccgcattttcatgcgcaaaactgagtcaggcgtttgggaaacggtcggaaaagcggtcagaaggggttatcagaacggtcttttatctcatttgcccggaggatccgaaccgattaagtttgacacatggtttgaggaaattccgagaaagcagcaggccgttttattggatgatgtcttttcgatcacccaatccgtcccttatttccttgatgaacggttcgggccgctgtttgagctggggctcgatatttgttatgccaaagacggacgcatctggcttttggatgtcaactcaaagccgggacggaaagctattttaagcgtggctccggaggcgaaagaggatttgtatacgagtccgctgagacgcttccgcgaacttcagtcacaggaaagccggaaaggagtattaccgcgtgaatcataaagggatgattgtcggcatcgataaaaaaagcaaaaatacgctgtttctcccctcctccatgaaacgggaagggcttttatccgctgccttcgggaccaaggttgtcaaatgccgtgtagccttttctcaatcacttgaaaaaagcgcgctcctttctgaagatttgtttgaggagctgttgataccgcataaaagccgggctgactttctcatacacggccagacggtgcacatcggaccgctgatcggcgttttcacagccgggttcacatcatcgccgtcccgcccgttaagagaccgtacagccttcttttccaagatgctctctcttcatgaacaggcgaacggatattgtttcgttttcggggcccatcagatcaactgggaggaaggcaccgtccaagcgctgatttataaagaaaacagctggaaacggacggccgtcccgcttccgaatgtcgtatatgacaggctcccgagccgaaaaacggaagaagttccgcttttacagcagacaaaacaaaggctgatgaatgactatcagattccatggtttaatccgcaattctttaataaatgggacattcataagcttctggaaaaaaacagtctcaccgcttcacttctgccaaaatctgtcctgcacccgaatgcagaagcgttagaaacgttatgcagcacgtttgacaccgtctatatcaaacctgcagacggcgcactcggaacggggatttacaaggtggaaaaaacagatgccggcttatctgtcaaacacacgaatgaggaaaaaacggtggtgacggcagagtattcagatgcggcatccttcatgacatcatttaaagaaaacaatgacccgtccgcatttttaattcagcaaggcattgacctgatccggctggatgggcgccccgtcgatttcagggtgcacacgaataaaaacgccgaggggaaatggacagtgacggccattgcggcaaaaatttccggtgaaaacagcatcacgacgcatctcgcaaccggcggagaagtcaggacgttagctgaattatacggcgatccgcgagagagagtcggcatgatgcggaaactttcaaaagccgccttggcggtcagccgcgtgttaaatgagcacattgaaggttttatcggcgaaatcggttttgacctcggcgtcgatcattcagggaaagtttggatgtttgaagccaattcccgccccgggcgcagcattttttcccatccgaagctgagatcggtcgattacctgacaaaacggagaaattttgaatacgcgtcgtatttatcagaacggtccatcaccgccccggaaaaactttggcggtgaggctgtctttttttaggtttacccgggacaggcattgaacgatgagctacaatgaacaagatcaacatttcccataaggagcgtgaacgtcatgatttcgcacttcagctggaaaccgttattcaaaaaagagaaactgcccggatggcggatttcattttactggcagggtacgcattacgaagggatttatcataagtccggagacattgaatggggacacacacatccgggaaaagaagagccggctctcgtaaaagagctgcatgaattaatgctttatcacatatatgactgaaagctaaaagctcagccgcaccaggctgggcttttctttttccttccgctatttaccacaccgttttccgaatgagatgccgtttgattcaccataatacgtagtacaaagcggcaaacagcattgggtgaagccgagctggcaatggttttcattccgaaaaccatcggctggtgcaattccagcaaacccaaccatactactttataaaggagatcatacaaatggcaaacaacaactcttcaaacaacctagtagtacccggcgctgctcaagcaatcgaccaaatgaaatacgaaattgcttctgagttcggcgtaaaccttggcggagaaacaacttctcgtgcaaacggttctgtcggaggagaaatcacgaaacgtttagtatctttcgcacagcagaacatgggcggccaaggcgtacaataactcaataaatggcttacagaaggcgcgggataccgcgtcttcttttatgccgtcacccttttttcctattccacataccctaggaaaaaaggagggaaaacatgtcattcattgcctcagtcaattgggagctgtttcagttcgtaagtgtctctttggtcaatgaatatgttgcccaccatttcccgtttattcacaggtattcttttccccgctgctttgaatgatataatgagcggcgaggaggttttttacatgaacatcgctttactcggagcaacaggaagagtcggacaggcttttataaaagaagcgcagaaacatggacacatggagatattcgctcttgtcagatcagccggaacagtccttcccattcctgaaaaacaaatcataacagggaatgcgaggcggcgggaagatgtaagccgattgatttccaaagcggacacagtcgtgagctgtctcggcacggacggtgacgataccctttcagccgctatgacccatataatagacagcatgaaacggcatcatgttcagcgtctgattacgatcggcaccgcgggtatccttcaatcacggcttatgcctgatcaataccggtttgaatcggcagaatcaaaacgaaaatcaacaagagccgcaaaggaacacgcccgcgtatacgaaatgctgctggcagaggatcttgactggacgatcatctgtcccacctaccttcctgacggagacgctgccggagtttaccggttcgaacaggatcgccttcctgaagacggcgctgaaatcaccgtcggagacacggcgcactttctgtaccgtgagctgatcagcccgcagtttgtcagaaaacgggtgggactggcttactgaatgaaaaaaagggcgaatctttagattcaccctttccgattacaccgcggacttcgccgttcctttctgcaattcatacatttggtggtactgccccttttgcgccattaattcgtcatggcttcccttttcaataatgcggcccttttccagcacgagaatctggtctgcgtgtctgatcgtggaaagccgatgggcgataataaatgtcgtgcgcccttcttgaacgacttgcagcgctttttgaatgactgcttctgtttcggtgtcaatgtgcgccgtcgcctcatccaaaattaaaatggccggatcgaacacaagcgctcttgcaaaagaaatcagctgacgctggcctgaggacagtgtgccgcctttttcggtaacgggctctctgatgcccttcggcaaagattgcagaagacttgcggcgccgacttggcgaagcgcttcttccgcctgctccaaagaaatacgctgatcatcgagtgttacattggagccgatcgtgcccgagaaaagatacgggtcttgcagcacaatgcccatatgcgacctcagctcctgcctcgacatgccgtatatgcttttatcgtccagcaggatatctcctttttgggcatcataaaaacggaacagaagattcaggatggagcttttgccggaccctgtatggccgacgagggcgaccgtctcccctttttcagctgtaaagctgatctgtttcagcacctcttccccctttcgatatccaaaagaaacatcgcggaattccactgtcccttccgcctttctgtctgcgggagcgccttcttcttccgtttcctcctcctgtaaaagctcgaataccctggcggcagagacacgggccaattcaagcttcgaaaattggttgacaatccccgtaaccggctggaacaaacggtttaaataatcaacaaacgcgtataaaacgccgatcgaaacaattccggccgcactcagactcgcgcctccgaaataccagatcagcccgacaaacgccagattgcgcaacacattgacaagactgtgggacatgagggaatttaaggacagcattttgtttttgtagcgaaaatgagcttcattcaattcttcaaattccttcatcgtttccttttcgcggcggaacgcctgaataatcggcattccttgaatggattcgttcattttcgcattgatgttactgttaatggaacggattttttggttgaagacggatgcgtatttgcggtacacaaccgaccagatcattaaaatcggaataatcagcaggcaaacggcggccagcctgacgtcaagcataaacagcgccgtaaaaatgccgagcatataaacgccgcttgtgataaatgtcgacagcaccgttacatataaatccctgaccgcttctgtgtcattcgtaatgcgggccacgacttttccggcaggcagattatcaaagtagcggatcggcattttctgaatgtgtgaaaatacatcctgcctcatgcgctgtatgatccggttcgctcccatctgcagcagataatgctggccgtaatgaaaacatacggaaaacatgagcagtcccgcgtaaatggcggtcagcgtcagcaatccttttatttcgggacggtaaaattgaaaaatctcctgtcttgataacgtaatggcgggatatgacctgctttctttaccgtttgatattgtcagccggccgtcagacaccgaacggtttccgtcaaaactgacgggacggtcaacaaaatagtagcccgcaccgacttgataaatgtgcgcctctccggttttgtccgcccccggtttgagccggtcctccctgacataatcatgcccccggaacctgacggcgcccggatcgtccgcagaggctttaacccatgttttttcaatgccgagaatgtggtcgtcaatcattttttttccgataaacgggccggtcagctcagtgccgaccgcaataatgagcaggacgaccgcccatatcagcagcttcttatattgaagcgcgtaattccataatcttctcccggtcttcatgcgcccgtccccccttcttcaagagaggacagccgctgcctctcatattgttttcgataccagccgttctgcgccaacagctcccggtgcgtgcctctttcagacacccggccttcatccatgacgagaatgagatctgcgtgttcaactgccgagagccgatgggtggtgataatcgttgttttatgccgccgttttttacggatgctgtcaatgatggcggcttccgttttcgcgtctacggcagaaagcgaatcatctaatatgagaatgtcaggatcggtcaaaagcgctctcgcaattgagatgcgctgcttttgtccgccagagagcgctacgcccttctcgccgacaagcgtctcaagcccgtcggaaagcatgccgatatctttttcaaaatgcgcatctttcagcgcgctgccgatttcctcttcgtttgcatcctgccgtccgtaaagcagattctcttttacagtctttgaaaataaaatatgatcctgcggcacatagccgatccacccgcggagctcctcaagcggaatctcctgaatcggaacgcctgtaaacgtgattgctcccgcgccgggcggatattcacgcaacagctgcttaatgatcgtcgtctttccgcttcccgtcttcccgacgatgccgagtgtctgccctttttctacggaaaaagatacatcagaaaccgccggtcccgctccgctcggatacgtgaaagtcacttgttcaaaaacaagacgcccgggctccttgatgccggcggggtgcttgggtcctgtcacgtctggctcataggaaagcgtctcattgacacgatccaaggaggcatttccgcgctgcatgatattgattaattctccgatcgcaaacatcggccagatcatcattccgagatacacgttaaacgataccagctctcccagcgtcagccggttttgaaaaacgagataagcgccgtagccgagaccgatgagatagctgaggccgacgagaagtttcacagtcggttcaaaaagtgaatcgataaacgccaccttcatgtttttctcatatacatccgccgtcatatcaccgaaccggctgacatcatttttttcctgcacgaaagcccggatgacccggacgccggataccgactccagcaccttgtcatttaatgatccgaaagcatcctgcgcttccgtaaaccgctcatggatcttttttccgtacaggctgaccgcagccgccattatcggcagcggaataatcgcggcaaatgtcagcttccagctgatgagaagccccattgtcaaaaatatcgtcagcatatacatcgtcgaatcaacgagcgttaagaccccgaagcccgtcgtcatactgacggcctgcaagtcatttgtcccccgcgccattaaatcgcccgttctgtatttctcgtaaaacggcggtgacatttgaagaagccttcccatcagctttgaacggagaatcttctccatgacattcgccccgccgaaaagctgatacatccaaaaataagacagtaaatagacggctgccgttaatgcgagaaaaacacatatgtaaaacagcatcccgctttttgtaaacacgcccgccttcatatcgtctatcgcgttaccgagaagtttaggcggaaacatttcaatgacattcacaatcaataacagaacaatcgctgtcgtatagcgcagccaataggctttaaaaaaccacgcgagcttttttaatacagtaaacaaataccgtcatcccctttcatcaatcagccgccctcaagcttttccggattgtttttcattgttttcgctaataccgccacatgcatcacacctgtctttctttcatttttttgtataaaaaaagacatgaagcctcagctccatgcctcttattattataaataaggtacagacccgccgtttatgcgcgactgccccgtttttaagcaaatgttcagaaaacggaagctgtatgggagtcacgccggtattcagctgaaaatgagttgacaagctttagttttgacatgatccatacctcctttttccctatattgttccttcatcatataaacaaatcctttttttgtcaatgcaggttttacatttctgccattcgggtattgtaaaacaaaccttttttactgaaaggatgaggccgatgtttcatgcggaccggttgatagcagcttttgacggaagtgatgatagtaaaaaagcgctccaaaaagccatagacctttcaaaaacatttcacgcggatttaacggtcgtacattcccacaatgcaaaagatacccggacgattgttgatcccccgaggccgggagccggggcaacgtatatcggcggcgggattgcaagcgttcctgacccgctccaggcggaaagaatctcccctgatccgatgatttatgaagaccgtacggaagaaatcgttgcggaagcgagaatgctgatgaacgacagccagattgacggggatatcgacattttagaaggtgatcccgctgatgccattatcgagcatgccgaccgtatatcggcggatttgatcgtcatggggagccgggaccagaacaggctgaaaaaacttttattcggaagcgtcagtgaaaaactgtcatcgaaatccgatattcccgtgctgatcgtaaaataattctttctgtaaagcagcttaatcaaaagctgctttttttacagctcccggctgtttcttctttttttcggcatcacaaaaaaactcgccatgatcaaaaaatcgatgcacaatacgacagaccagccctttaacagcttgctgagcgcttcggtgcgggaagcgtcctgaatgagaaataccgttccggctaaaagaacgccgccgatgacaaacgctaatacatgtcttccccatccttttgcataatgtttggcataatccagcccgtaccgtttgaccggttttgccccttccttgaccacataatagcggaaccgctcatccgcccattgaatcatgcttttcccgaaggcgacagacactccgatataaatggccgccaccgcatgcgccatagtcgccgccgcccctctgtataaatcagctgcggccgccagaaacagtacggcatccaataaaggaatgagagcgaaaaaaaacattccgagcttttgccgcctgaatatatagcgcgccgccaatccgaagatgacagccgcccaaaaagcagcctcacaaatgacaatcaaccaagcaatcgcgttcaatccggttcccccttatcgttttctaaaatgcattgtatcactgctttttatttaatacaactgtattacaaaattgcaagaaaaaatatttcctgttacactggaaccatgcctaaaataatcgatcatgaaaaaagaagaaaacaaatagccgaagccacttggcggacgattttggagcggggaatggaaggagcgacagtgagaaacatcgcccaggaagcgggtctttctttaggcgcgctgaggcactatttcaccacccaggatgagcttttagggtatgcgatgacactcgtaaaagaaaaagcggccgccagaattaacgaagttgccatgaaagatctgccgccgaaagaaaaagcggtgcgtctgatgcttgaaatcatcccgacagatgaagaaacgatggctgaaatggaggtatggttcgctttcacagcttatgccagacataagggagaagagtttcaaccccagcaggacgggatcttagcatatatccgcggtctgattgactggctggatgaaaataagcttctgaaaccgaatcttgataaagagatcgaagcggagaaaatgtacgccatcgccgacggattggcgctgcatgccatgcttgaacctgagcgtctttcaaaagagaagatctcccgtgtgctcattcagcatatcgaatctctttttatctgactgaagtaaaaaggccggatgtgttccggccttttttcagcttatgactgaaccccgagctcctgctgaatgtgcgactgaaaagcctcctgaatcgttttggctacaggtcccggcgctccgcttccgaccggttttccgtcaagggttacgatcgggattaattcagccgtcgttgacgagatgaaaatttcatccgcatccctgagttcgtcttcggtaagagccttctcccgcacctcaatcccgttttctttcatcagctctaacagtttcatccgcgtaatgccgtttaaaatcagctcatttgcaggatgcgtccggacagtgccgtttatgacggcgtatacattggaagaggttccttccgtgaccgctccgtcccttatcagcaccgcttcataagcgcctgcttcataggctttttgtttaatcatcacattatacagtaaattcagactcttaatgtcacacctcagccagcgtttgtcttctgccgttatggcctgcgctccggctttttgttcattttccggttttttcactgaaaaggtatatgccgtcgtctgcggttccaaaccttcgtcatactggtgcttgcgcggcgccttccctctcgtcgtctgcatatagaccccgccgtcaatgagtttgttttcctgtacaagcttttgcagatcccattctatgtcctctgcggagaacggcagggtgatgccgatttctgcggcgcttctgaaaagacggtcgatgtgctcacgcagaccgaataaggcgccgttatacactctgatgacctcatacacaccgtcaccgaattgatatccgcggtcctcaatatcaactgccgcttcttcacgatcaatcaactggccgtttactaatgtcttcatgtaaaccctcctcatcgttatctgccgtgatgtgcattctcagctgttattgtcaactattctatcatactgaacgagccggctgcggagtttatttttttcttaaaatcttattattcgacatcttttctatgtcttttccagttttgttcctgtatacttgattcgacatacatatgctgttaacttatggcacttcgcaagcctccgctgttatcggcattatgcagaaacttatgctactggagagattgttatgcgcaacacaaaagaaggtgcttccccttctctgttttcattggcttttaaacttacgagtttagcagttttgtgcggactgcttctggtaatcgtcataatgggatattccgcttccgccgcaaaaaacaaacaggtcaccgtgaccgcaaacgggcagcttcgggatgaagcagaaagcctgcggctgaaaaatgattctcccgacgtcttaatgaaacatttgcagagagagcgtgacccagggaaaaaaacggtatatttaaccttcgacgacgggccgtctccatatactgaacagctgttgaatgtattgaaggcaaatggcgcaaaggccactttttttatgcttgaaccgcggatgaaagcctataagcattccgtgcaaagagcgaagcaggaaggaatcgcgctcggcctgcacggcgtgacgcacgataatcacctgttttatcaaacaccgacatcaccgctgaacgaaatgcagcagggacgcgatacactcgaggcaatcaccggagtaaaaacggatcttgtccgcacgccttacggcagtaaaccgtcattgacggatgcccagattaagaatctcgaaaaagacggattcgtgtactgggactggacgatagacagtgaagactggaagtacaaaaacgcacggtacgtgccggaagtattgaatcagctcgcatatttggaaagcgttcatacgagcaggccgcatgtcattttaatgcacgatctgcctgcgacggtgcacgctttgccgagcctgattcaaaaactgaaagcccagggctactcctttgatgttctgacggatcaaatgattcccgtccatgaataagaaaagccggatctgtatatgatccggctttttttatgtcgcggcgctgatccgttttgcaaattcaccgatcttctcatggatgacaagatcaaataaatggtcgcaatatgtcggctcaaggttaatgatcacctgcttcaaaccgggaatccgtcccgcatcctcagggacaaaccttgccggcgccacttcaagcgaagtgccgatcacaagaagaagatcagctttatcaagcttttcataaagggtttcaaaatgctgaacgagatcgccgaacagcacgacatccgtttttaatacggtgccgcataccgcatgatcaccgatttccgccgtacattccggcacttcgtccttcagcagatgagaaagcccgtagcgcgctccgcagcgggggcatgcggcggtctgaattgaaccgtgaagctcatagacactgctgcttcccgctttcttatgcagcccgtcaatattctgcgtaaaaatgtctacctgctttccccgcttttcaagatccgccaaatacgtatggccggcattcggctcatagcttccgctcattttcatctgaaagagctgtttgaatttaggccagaattcacgcggacggcgttcaaaggattccctgctcatcgcttccattctggaggtgtcttcggtccatataccgcccgccgaacgaaaatcaggaatgccggattccgtgctcattcccgctcccgtcagcaccacgatacgttccgcctgattgatcaatgtcataaacgcttccactcttccaccgccttttctttttatcatatcatgaaaaaagaacggcgcctgttatgcccgttctttttctccggaatgatccttcacatgaaccggatcatcgtggcttttctgttttacgaatacattctggcccggataggcgaattccacgccttcctcagcaaaaatatcaataatccggcggttgatatcctgccgcacgtccaggctttccgcccagacgatggtctttgtgtaaaagttgaaaaacagattgtaatagctgtccgcaaacacgtcaaagttaaccataatcgtatcatcatgcacgccttcatgttcacgaagcatttctctgagccttgtgatgcaccgctctaaacgatcaatcggcgtcgcataagaaacacgaacggaaaacgtgacctggcgcttcgtcatcctcgtccagtttgtaatggcttccatggacagcgttgaattgggcacggtaacaagcgccccctgcgccgtgcggaaccttgtgcttcggaatgtgatatcttcaacgccccccgttacagatgacgtctcgacccagtcgccgatcgtaaacggcttttccgtaatgatgataatgccgccgaaaaaattgctgatcgtatctttagccgcaagcgcgaaggccaatccgccaagtccgagtccggccacgaacccgtttacatcataattgaattcctgcgcgatcacactgacgctgagcgcgagaatgacaaagcgcagcaccttggataaaaacggcgccaaaatgtcatccatatcaagctcaaagcgctgattgactttatgaaataaaaacgaagacgccgatgtcagattgcaaagcccccaggcgatcagcgcaacgatcagagagcggtacaattttttggcaatgtccatctgcccgtctaaaaacggcgaatactcaatcgccaaaaacagacccagcgccacgaaaaaccacctggccggcttgtcaaacgctacggcaatctgtttgaatatgtcggttttcggcttgtttgccaatttgtaaatgagctgaaaaaagtatttgacaaacagttttctcaaaacgagaaaagccgctaaaattccgatgctgatactgatctgcaaaatatggtcaagagtaaaaaagctctgaaattgtgtcatcatggcatatgctcctttgtcttgtcgaaaatctattatactaaaacattcggacatcagcttcttttaatgtctttaggcagcctgaaaaaccccggcatcagagcacagccggggtttttcacacattcgttcatctttcagccagatacaacagggtcaggcactatttcttctttgattgtgtctgtttcaggagagtcgctttttggatttcagcatcggtttcggccttaattctttcttccactttcaatctcccttttcccatgatctcgcctcctttttgccattataaatcatcactgcggattgtaaaccgaaaaaagcactatctttattccaaaaaaatactgtttcgcacattcaccagtttgaatcgctgtgcatatacgaatctgatataataacagaaatgcccatgaggggagctgacaagcttgtataccatcgctcatcgcggcgcatccggttacgcgcccgaaaatacatttgcggcatttgatatcgctgccgaaatgaacgctgatttcattgagcttgacgtccagctcacaaaagacggccagattgtcgtcatccatgatgacaaagtcgaccggacgacggacggctccggttttgtaaaagattttacgctgaagaagctgcagtctctggatgccggcagctggtatggggctgagtttaaaggggagcggattcccctgctcgaagaggtcttgaagcgttatcattctgaaatcggatttttaattgaactgaaggggcacgtttctcaagtcggtcttgaaaaagcagtcggccagctgttaagcaggttttccttttccatccaccctatcgttcaatcattcagcctcaagtcaattcagacctttcacgacatgtatccgtccgttccgactgcaataattgcaagacccagcttcgggatgttttccaaaagccagctggccgcctacaaatcagccgtaaattatgtcaatattaaatatacccgcctgaatcggttcttgatttccaccgctcacagacacggcctgaaagtatttgcctggacggtcagaaatcaaaagacggccgaaaaactgcaaatgatggcagttgacggcattgtaactgattttccggattttatttctaaggatggctgatatgaaacaatatatcgcaatttttatcggaggcgcgcttggcgcattgctccgctttgaaatgagcgcgcacattcacagcggttctttcccggcggccactttccttgaaaacgcggcgggaagccttttactcggtcttattacgggttttttcatcattcgggctaaacgccctcttttgaccgcctttttaggaaccggtttttgcggaggtttcacgacgatgtcaaccttcgcaaaagaaaccatttttctgctgcaatcgtctcccgcagcggctttttgttatgctgccgcgactttattcgctggtcttgcccttgcatacgccggcattttctggggacggcgtattgcccttcacgcagcgggaagggggcatgatacgccatgacgatcgtcctgatgcttatcgcagcgggtatcggagcggtattacgttctcttttgggtaaaacaatttcagaaaaaacaaaaggttttccgatgccgcttggaatggctgcggtcaacctgctcggctccttcggcctcggcatgttcaccggcctgggcctggataatccttctgccggcatcatcatcgcgacgggctttttcggtgcgtttacgaccttttccacgttcagtattgaagccgtgcagctgatgatgaacaaccgcattaaggaaagcctgctctacatcgctgtttcagcagccggaagccttttggcgttctggtgcggctttgttatgatatccatgtaaaaaaaccttgagcttatttttcgctcaaggttgcgttatgaagcatgaccgtttcaggcacgggcagctggcggtttattgttccctgaccgcccgggcggccctgttcttctttgagttcaagctgtttaataaaccggccgtccatttctaatatgagggcagtgtatcccccgatttgtatcgactcacccgcacagatgtcaatattccgtttcagcacaagaccgccgatcgtgtcgacttcctcttcaatccctgcgccgagaagatgattcacctgatcgatccgaacctttccgtccagcacataatggcgttcggacagcttttgaatctgcggctgttcgtcctcatcaaattcgtctctgatatcgccgacgatttcttcaagtatgtcttcggtcgtcacaagaccggacgttccgccgtattcatcagacaatatcgccaaatgaatccgttctctctgcatttttatcagcaggtcgtgtatcgggatcgtctcgatgacttcaatcaccgggcggacgtaagacgtgatggatacttccgctttttcatcttctgtcataaacagcagatctgaaaagagatgcttcgtattgatcatgccgatgacactgtctttgtccccgtccgttacgggccagcgcgtatatttgtctttcagcatcatatcaagcatttccggcacgtccatatcagtggaaacagccgcgatttcttttctcgggatcatgatttccttggcgatccgattatcaaaatcaaaaattttattcacaaacgtatattcagacggattgatttctccgttttttaaactttctgacagcaggatccgcagctcttcttcagagtgggagccttcatgctcagatgccggctttaatccggccaaaccggtcagaattctcgcggagccgttcagcacccaaataaacgggaacatgaacacgtaaaataaccgaagcggtccggcaatccataacgtcagcttttccgctttttgaatcgcaaccgttttaggcgcaagctcaccgacgacgacatgcagaaacgtaatcagcccgtacgccgcagcaaaagcaatcacatgctcagcagaatccggcagccccatgccctgaaacacaggatgaagcatccgctcaaatgcaggctctcccagtacgccgagcccgatggatgtgagtgtaatgccaagctgcgacgcggataaatactcatcaagatccgtaatgatacgctttgcgagcaccgcccgtctgttcccttctgaaatgagctgatcgattctggatcttctcactctgacgatcgcaaattcactcgccacgaaaaatgccgttaacgcaatgagcacaccgattaaaatcaaactgtcaatatcgtccatttcaccttatcccgaattaaaggataaggacgtcacctcctgatttcatcgttttttcttaagcgagaggaacgaaatgggtgattgactacacagagggccccatcctgccacctcctaagtcaaagcatgattgtcatttgtatagtttattgtatcacaactccattctttcatcattttcagatttttatcatataaaaaacagccttcaaaaagaaggctgccgttatctgcttcggaaatgattttctaaacaaagcgccgtattaatccccccgaatcccatgcttaagcttaacgcatggtgtacggtatgggcgctcggcccgtcggtcacccactgaaatgaatcgtcaatcggctccgttaagtttcggatcggatgaagcttgttttcccgcatttgcaagagagcagcaatgatttccaccgttccggccgcactcagaccgtgtccggtaatcgattttgtcgcattaatccgcgcgtgcgacaggccgctttcagaaagcgcccggcattcagtcttatcaccgatcggcgaaccggtgccgtgcgggttgatgtaatcgatctctttcgctgaaaggccggctcgctccagcgcctggcggatcaccgtcatttcgccctctgctgaaggattcgggttgcggttcgcatcggaagccatcccccagccctttaagccggcccacgatcgtgcgcccctctcttcggcagattcagcgcgttccagcacaatcgccccgcacgcctctccgaatataaacccgtccgtatgccggtcaaacgggcggcaggcggcttcaggccgttcagcgtatgtatcagtgcccatcgctcccaaagaacggagagcatgacactccatgtacgacagatcggccagcgccccgatcacgatgcaccggtcaaacaggccgcctttgattccttgagcagcctgaataaccgccgcctggccgcttgccgacgcgccgccgaccgtaaaggccggcccttttatcccgaattgctccgtacaaagccccgacaaatcactatccataaaagaaagcccgtatgtcggatttacaaattgcggcgtttcaccgtttttctcaaaggcctgcagcaattcgcgctgcgtcatattcgagccgccgataatcagaccggtgcggctgtgatcagcgccgtctaattgagcgtcatgccacgcttcatataaagcgataagcgccgtctttcccgataatgcggcccttcggtacaagcgcttcgacagcgcgtccggcggcgttaattcgctaagctccgcgccgataaacgaactgcctttctgccggccgggccgtttcatcacatcaaaggcgtgccgcccctccataagcgcatcgagaaacgcctccttgccttgtccgaccgcggttaagactccgattcctgtaatgctgatgtctgacgtgccattattactcctcgacatttgtccgttctcccatctttatgtattggaagctatgaagaaaaatcttgatacagtgctttgaaaatatcgcgcgactgtctgatctgttctgaaggcacgctgaaagataatcggaaatagccgctttttccaaatccgctgccgggtacgatcaatagtttgtatttctgtgcggcatgcatgcagaacgccacctcgtcttcaatcggtgatttcggaaagacgaaaaagcctcctttcggcatttcaaattcgaagccggcttctgtgaggatgtccaccataaggtctctccgctttctgtaaggttcagcgtcaatcgaaagatcatccattttcgccacggcgcgctgcatcatgaccggagcgttcacaaagccgagcgtccggttgcagaaaacgaacgcatccgtcagaagatcgccctcaggcatttgggcgtctgccgcgatatacccgagcctttcccccgcaatgccgagatctttactgaacgaactgactaaaatcacgcggtgatacgcctgaaacggattcgcctgctcttctccgtagatcagctggctgtacggttcatcaaataaaataaatatgctttggccgttccgctcttcggcttcttttaataaggcgcccaattcgttaaggtttttctggctgagcacagtccccgtcggattatgcggcgtattaacgatcagtcctttcgtacggggggtgatcgcacctttaaccgcttcaatgtcaatctcaaatgagtcagtcagcgggcagatgacgggtctgccgtggtaattttcaacatacgctttatattccgcaaaataaggcgaaagaaggatgacttcttcctcggggtttaaaatacttttcagcgcgacattcagcgccccgccggctccgaccgtcatgactgtatacctggcggaaatttctgtctgaaaccgctctgacaaaaagcgcgcaaccttttctctcgcctccggaagcccctggttttgtatgtatccgtgccgccctgtttcagccgcttcgcaaagcgcctttttaaatgtttcaggcggctccgcaaccggatttcctattgaaaagtcaaacaccttatcggcgccgaactcttttttcagccgagcgccttcatcaaatagtttgcgtatccatgaacctttctccagattctgtgtcacttcccgtgataaaccggccactgtcatctgtcccttctgtctttttcttccgtttctatttacaatgattatgaaagatttacatggcgcagtcaacgctttttcagacagcccgccgcgccgtttcaggagaaagacggaaaacaataaacttgtgcaaactccccttcatatattaaactattctcataactataacgtgatggttggggagggatttagatggggctgagacttatcgcatcagtgaattagcagagcttgccggtgtaacgaaacgcacggtggattactacacaaacctcgggcttttaaagcctgacaggtcttgttcgaactatcgttactacgatacacttgcacttaatcggttaaagtttatagtcgcttgtaaaaagcagcgattggccctgtctgatataaaagatcgactggagaaccagtttccctcttcagccctgcctgacgatattggaaatctggcatcggaaattgatcacatgaatcaaaacatctccgtgatcttgaatcggtttgaaaagcttgaaccagaggagcgcgcccagctgaaaaaaaggctggctcctgaaaagcttgcagtgcttcaatcatttatgctgctgttaagttaaaccattatcttactaacaggaggtgttaccttcatcttcccaaaagaagtgaaggttctaattggacattgtgaatttgattttagtcgcggttttaatcgcgctgacggcatttttcgtagcatctgagtttgcgataatcagaatcagaggctcacgggttgaccagcttatagcagaaggaaataaagccgcaatcggtgtcaaaaaagtgaccacgcatttagatgagtatttatcggcgtgccagctcggcataacattgacttccatcggtcttggtgtcttaggcgaatcaacgattgaacgcttgcttcatccgcttttcacaaagataaacgtaccaagctcattatcgcatattatttcatttattctcgcctatgcgatcattacattcttacacgtggtcgtgggagagttggcgccgaaaacagtcgccatccagaaagcggaagccgtttcaatgctgttttcgaaaccgctcatttggttttaccgcatcatgttcccgtttatctggcttctgaacaactccgcccgtcttttaacgaaggcgttcggtcttgagacggtgtctgaaaatgagcttgcccactctgaagaagagctgcgcatcattttatcggaaagctataaaagcggtgaaatcaaccagtctgaatttaaatacgtgaacaaaatctttgaatttgacgacagacttgcaaaagaaatcatgattccgcgtacggaaatcgtcagtctgccgcatgatatcaaaatttctgaaatgatggacatcattcagattgaaaaatatacccggtaccctgtcgaagagggtgacaaagataatattatcggcgttattaacattaaagaagtgctgaccgcctgcatcagcggcgaagtatcagtcgactcgccgattaccgattttgtcaatccgatcatccatgtgattgagtcggcaccgattcacgatctgcttgtaaaaatgcagaaggaacgggttcatatggcgattctgtcggatgaatacggcggaaccgcggggcttgtcaccgttgaagacattattgaagaaatcgtcggggaaatccgtgatgaatttgatatcgatgaaatcaacgaaatccgtaaactcggcgacggccattacatgcttgacggcaaggtcctgattgatcaagtgaacgaactcctcggcatccatttggaaaatgacgaggtcgacaccatcggcggctggttccttacccagaaatacgacgtcgaacaatacgactcgattatcgaagaaggctgtgaatttatcattaatgaaattgacggccaccacgtcgcatatatcgaagtgaaaaaactggcgtttgatgaactgctggaaaccgccgaacaaaaagaagcataacaaaaaagcttgcgcgtctgatacagacggcaagctttttttcatttacagttgttcaagttttttctcaagctctttaattctggcattcagctcttctgtcatggccgcaagcctctccttcggcgcaagatcggaaaagtcctccaaaaaaatcggctcgccgatgataagccgcatttttccctttttaaacagcgcttttcccgtagacggccctttatatgcggccggaacgagcggcgcttttcccatttgggcgatggtcacggcccctcttttcagcgggacgtcttcagatgttctcgtgccgctcggaaaaatcccgacaatctttccttccttcagaagcttaatcggcgttttaatgctgcttgggcccggattttcacggtcaaccgggaatgcgtgaatcttcttcaaaaaacgtccgatccactttttctgaaacagctcttttttcgccatataatgaatctgaaggggcaatatcccgacaccgagcgtgaggacgtccacccagcccgcatgcgtgcacgcgataacgaatcctttatcagacggaagattctctttattgtacactttcactcctccgcgcagggatagaatgcatttgatggcatttgcacaaaacttatacataacgcacttcctttgttgtaatgatcaaaagtgttctctctctctattataacaatattttttattacctggtactaataattatatttttcctccgccgatctctatcttttatgacggattttgggtactatagagaaatggtgtttgatgaggtgaaaatgaatttaagccgtttgcatggaacgtgcaactttaaacctttcttatgcgtgtataacatagaggggagaaaaggcagtgacgatcgatgaaatttaccaaatgtatatgaatgatgtttaccggttcctgctctccatgacaaaagacaagcatctcgctgaagatttgctgcaggaaacctttatgagggcatacatacacattcactcctacgaccacagcaaagtaaagccatggctttttcaagtggcgagaaatgcgtttatagattatgtcagaaaacataaaaaggaagtgaccatttccgatgacttaattgggagcctttttcagacggctgttcaaagcccggctcatcagattgaaatcaaggaagtgctgacagggtatatgtccgaacttcccgacaattatcgggaggccttaacactgtattatttaaaagaactgaattacaaagaagcatcccatattatgaatatttcagaggctaattttaaaagtgttttatttcgtgccagacagcggctgaaagcactttataatagaggtgttaatgatgaatgaagaatttaaaaagcgtttttaccaatacaaaaatggagaaatgagcgaccgggaaatggccgcctttgaagaagagctggaaaagctggaagtctatcaggagttgattgaaagcgaaatgcaggacgaccgggaatgggacgtcggcatcagcccggaaaaacagaaggccattttatcatacggaaaacgcaaatcgtatttgcggatttcagttctcgccgtcatctccactttgatgattttgccgctttgcacattaggaagctacctctattacggtctgggaggaaaagaaagcaccggcaatcaattaatggagaccgcggcagtgacggtggcgaccacaatgccgaacgtcctcgtcgatacctccggactgaaaagccaggtgaagctgtttggaatgaatacggaatttccgctgcaaaagcagatcggcacaaaaacgaaatccgtcggcggagaacggattgaaatgtttttagatacggtcaaatcgcctgccgttaactactatgatttagacgcggcacaggcaaagcattatttcgcccatccttccggcttaaaggaacgcacgattgaaaaagccggacagacattaaaaaaattgcctgaaggaagcgtggcggaggtctatctttcttatgacagggcctacccttcttctcaagtatattcgacttttaaaaaatacgatgtgaagtttttatggaacgcggtcgaaacggagaaaaatctgaaagacagtccttatgccgagccgttaggatttcccgggaaagattccaagatggtgtcctctttcgaaacgcaaggacagacagaccgtgaacaatttatcaatgcccttgaatttatgtcccgccataaaaaatgggcgcatgcaatatcgaaacgcaaagacatgaatcttggcagccgaatcgactatgttgaacatcacggaatgaacgtatacggctctgtcgtgacggggccgacaaaagaaatcgaacgtctgctgaaaaacaaaacagtaaaagcagcaaacatcggtgaggtggaattatggaattggtaagaatttttaaagagcataatgttttcggctggatatcagtcggtaccgcgattttgtcgctgctgcttttgaacgtggcaatcatcagcaatgtgactttctattcttatcagatgctgccgtttgcgatggccgccgtgccgttcggcatcattgagctgtttattaaaaaaggacggacgggcccgggactgctcggtgtcattctcaatctgttcgtcattgtctgtgtatatacgatcgttgcggttgatacgaatctgcaattcggtttttaaacataaaaacaggcccttttacgggggcctgtttttttaaaatgaaagaacgccgattaaatgcagcaatacgacgatgatagccagcggcacgagatatttcagaaggaaataccacagctgaaagaaacgatagccgatggcggaaccgcttttcatctcggcaaacagctcctgcttcggtattttcagcgggacgaagattgatattaataaagcgccgagcggaatcagcacattgctgacggtgaaatccgcaagatcaaaaaacgtttttccgaacaaatgaacatcaccgagaacaccgtatgataaacaggacggaattccgactaagaaaatgagcagaccgcttgtccacgacagcttctttcttttcgtttcatcacctttcccgacagtcgccacgataatttccaccatcgaaaaggccgaagtcagcgcggcgaagaaaaagaccgccaaaaagctgataaaaaacagcgagccgaacggcagccggtcaaacacagccggcagcacggtaaacagcagtgtaggcccttcatccggtttaaagccgaacgaaaaaaccgccgggaaaatggccagtcccgcaaacagcgtaacgagcacattcatcataacaatggaacccgccgaacccggaagattttgggttttcggcaggtacgaactgtatgtcaccatgaccgaaacaccgagcgttaatgtaaaaaacgcctgtcctaaagcatataggatggattccggcgtcaaatcttcaaagtgcggaaccaataaaaatctaatcccctcaacggcatgatcgagcgtgactgatcgcagcacaagcaatagaaacagcacgaataaaatcggcatcagcaccgcactgacacgttcaatccctttctgcacgccttttgcgacgaccgccaccgtcatgatcataaatacaagctgcgcaatgagagtctggatcggattttcaatgaccgtcccgaacaccgtgccgtactgctcctgagtgagcccggataaagaaccggtaacggcttttaacacataaagcaaaatccacccgccgacaacactgtaaaaagacaaaactaaaaaacaggccgccacacccacataacccgtaaggtgccataccgacttcggcgcggcttgtttgtaggcatcaatcgcatttgtctggctccgtcttccgaaaataaattcaccgagcaaaagcggatagcctaaaagcacggtaaagaggacgaatataagaaaaaaagcgcctcccccgttcgtacccgctacgtaagggaacttccaaatggctcccaggccgatcgccgaaccggcagcggccataataaatcctatttttgaggcccattgaacccttttttggtcagacacgactttccacttcccttccgccctatattatcccttattcgctgcgataacttaagcccatttcaatatgtttcattattccgaaaaataaaaaggagcggcgggtgccgctccttacaaatccccgtttaatttcgaatgctttctcgaatataagaaataaatcaccagaccgatgatcagccagataaagaaacggaatatggtggtggcgccgaggttaataatcaaaaacacgcagaacagaatggacaatatcggaataaagggaacccccggacatttaaaagcccttggcagatcaggctgtttctttcttaatacgataactgccactgaaatcaggacaaatgcggcaagcgtgccgatgttcaccagcttcgccagttcatcaagcgggacgagcgagccgagtaatgccgacaggatgccgaacacccatgtcaccacgtgcggcgttttatgcttcggatggacttttgaaagcgcccccggcaccaaaccgtcacgggacatggcaaacattaccctcgtctggccgtacagcatgacgagcatcaccgttgtcatccccaacactgcgccgatatcaataatcccggccacccaattctgtccggccatctgcaggacgagagacacgggatggtcaacgccttcaaagcgggcaaacggaacgacgcccgtcataatcgccgatacggtcacatacagcacggtgcagacgattaatgaaaagataattcctttcggcagatccttcgccggatttttcgtttcttcagcggcggaagagacggcgtcaaaaccgataaaagagaagaaaacgagcgccgcggcactgaaaacaccgccgaaccccatcggtataaacggctgccagttgtgaggtttgacatatacggccgcaacggcgataaacaatagaacaaccagaaccttcaaaatgaccataatattattgacccgcttcgattccttaatgcctaaatagaggaggaatgtaatcgcaagcacgataacaaatgcggggagattaaagaatgtgaccgtgcctttaatagatcccggcgcggccgttaatgcagtcggaagatgaatgccgaagcccgccaagaatgattgaaaatagccggaccagccgaccgaaaccgcgctgacggcgagcatatattccaagattaaatcccatccgatgataaacgcgagaagttcacccagtgtcgcataagtaaacgtgtagacggaacctgaaaccgggacgcttgaagcaaattcggcatatgacagagccgcaaataaacacgcaagagcggcgatgacaaatgaaacggtcagccccggccccgccgtgacagcgcctgttccggttaatacaaaaattcccgttccgatgatggcccctatccccagaagggtcagatcaaaggcccctaactctcttttcagcgacttgtccccgcccgttgcggcaagcaggtcctgaatgcttttctttctgaatacgctccccttcatctgcttcactccttgtaaatcaatatatgttagaatattcagataacaatagcaataatgactaaattcttatttttcgcatgaaatgtttcagcacatcatccctttctcctatgtcatattatagcgaaaaatataaaaatgaaaataattttttgaaaattctatatattatttttagttttcataaaacagaacgcagcggattctccactgtgaaatattaacattagtgattcagctggagacttccattttttgaaaatcgtattcatatgtacgttcaaataaaaatcccgccctttttaaaagcgcgggataagacttgcgtattatgttgaaataaatctgccgccatttacgtgaatggtttgccccgtcatataggaagattcgtctgaagccagaagcacgtaagctccggcgtgttccgcaggctgtcccggtcttcccatcggagtgtccagaccatgcttttccaccttttcttcagtaaacgttgccggaatcagggcggtccagatcgggccaggggccaccgcatttactctgatcccctgatcggccaatgacatcgccattgaacgcgtaaaggaaacgatgccgcctttcgtgcacgaatagtcgatcaatgatgtgtctccctgataagcggtaatagacgttgtattaatgatggcgctccctctttgcaggtggggcagcacggcttttgtcatatgaaacatagaaaacatgtttgtacggaatgtcttctccagctgttcagctgtaatatcaagaatcccgttttgcggatgctgctcagccgcattattaacgagaatatctatttttccgtagtgatctaagacttgccggaccgccttctgacaatgcgcctcatcaccgacgtctcccggaattaacaggcattcggcctggtattcttccgcacgctttttcgttctctcggcatcggcatgttcgtctaggtacaggatggcaagatccgccccttccttcgcgtaagcgatcgcagccgctgcgccgatgccgctgtctccgcccgtgatgacggcgacttttccttttaatctgcccgacccttttacatccgggtcctccaagagcggtttcggctccatgtctgactcaatgccgggctggcgcttttgcacctgcggcttttgtccttccgtctgtctgtccatcggattcatattctcacactcctgcaattggtattactgagacgataccacgcagtgcggggagttaaacggacaaatatgccggtaattaaagctgctgagccgtttcgggaaaagcgccggtgtatttcgcagacggcctgtaaatcatgttgtcagcggactgttcaagcacgtgtgcgcaccagcctgccattctgcttgctgaaaaggtcggcgtaaacaaatcattgtcgacatcaatggcctgcatcacagccgctgcgtaaaactccacattcgtatacagcttccgtccgggcttatattgctctaacaggcggatggcttccttctccacataaagcgccaagtcaagcgacggatcatttcccgccacttcttcagcctttatgcgcagcgcttccgcccgcgggtcttttgttttgtacaccctgtgcccgaagcccatcaggcgttctcccctcataagcttcgctgccaaatacgcttctgcattttcttttgtcccgatgtcttcaagcattttcgtgacgcctgaaggcgcgcctccgtgcagcggccctttcatcgtacccagtgcggcagtgacggcagacactaagtccgattcagtcgaaacggtgactctcgctgaaaaagtcgatgcattcatcccgtgctccatcgccagaatcatatacgtctcaagcgctttcttttgggctgcggacggctgcctgcctgtcagcatatacaaatagttttcaacgtgtccgtatcgcgcctcaggtgacaacgcttcctgcccttgtttacggcggtatctgtacgcaataatcgtcggtgtgacggcaatcagtttaaccgcttcttccggcttgggcggatatgtaaatgaatctgtgcccaaacctgaaacagccgttctcagcaccgccatgtcgtccatttcatccggaagcgtttccagtaagtcgatcaaatgtttcggaagcccgcgctcggctgcaagttcttcctgaaacgcaagcaattgccgctcatcaggaagcgccccgttcaaaatgagatacgccgcttcttcaaaactgaattgcagcgcaatatccttcgcatcatagccgcgatatattaaatgccccttttctccgtcaatgtggctgatagccgtttctgcacaagtaatccctttcaatccacgataaatcaatttcattcccccttatcctctttctgttattatagtaaatataatatttaaaaaataatgaatatttttaagggaattaattaaaacttttaatcagaggagtgcatctatggattttaaatggcttcacaccttcgtcaccgcggcaaaatatgagaatttcagaaaaacggcggaaacgctttttttatctcagccgaccgtcaccgttcatataaaattattagagaaagaaatcagctgcaagctgtttcagcgaagcggccggaaaatacaattgacggaagaaggaaaagcatacgtgccgtttgccatgaggcttttggaagactatgaaaacagcatggcggaactgcacagggtgcgccagggctactcgcacacgctgacactcgctgtttcgccgcttatcgccgacaccgttctcccgtctgtcatgaagcgttatacagaggacaataaagaaaccgaaatgacggtcaccattttcgaatcggaagaaatcgcctctcaaatcagaaacggctcagccgatatcggactgagctgcttaaaggtgcaatcatcttccctcacttgccgccccctgtacaatgaccccgttgtcctcgtcgcgccgcccggccgaaaacccggaacagggaaggcggatgaagtgaaagacctgttcggacaatatctgcttttgacccacaaccatcctgactattgggatgatttgctccgccaggtcagaatacagttccctttcgtcaggacaatgaaggtgacacagacgcatattacgaaacgatttattaaagaggggctgggtgtctcatttctgccgctgtcagcggtacgggccgaactcgccgcaggcagcatgattgaaattccgtgcgaattcgcccagatgccgagcgcgggcgcatacgccatcgccctctatgaaaatgaaaaaaagaaaacctttttagattttttatcacattttcatttttaggtgaaacaaatggagctctgtcccgtctaaataaaaaacccgttctgatgaacgggtttctatcgctgctagaatcttttcgcgcccaggtagcgcggtttccagtagctgttattcagatcacttgttgtgacgccgtcagaaccggcatggatgaacttgttgtttccgatgtacacacccatgtgtgaagggccggcctgatatgttgtaaagaagacgaagtctcctcttgacgggctggacacgctcttcattgagctccagtatcccgcagtgctcgttctgccgacactcgtctgtttgtttaacaggtaccagataaatccgctgcagtcaaagccggaagtcgttgttccgccccatacatacggcgtgccgattaaagattgcgcatcagaaatcagcttgtttacattcaggctcgtctgtgcagcattatggctggatgaaggctgctttgatgacgaagatcctgaagacgttgaaccggaagttgatccctttactttaagaacttgtccgatgcggatcaggtccgtttttaaaccgtttaaactttttaattggtttaccgtcattttatatttattcgcaattttccaaaggctgtcgccttttacgactttatatgtagacgatgatgacttgctgcttgagcttgaacctgaggatgatttaccgttaatcgaaagcgtctgaccgatgtaaatgatatccgattttaatttgttctcagatttaatggaattaattgacgttccgtaccgatttgaaagtccccataatgtatcgcctttttttaccttaatcgtttgcgcagatgccgcgcccgcaaacaaagtcgtccccaaaaccactgccgttgttgctgtaacaagttgctttttcatattttcctccctgaatgattctatctattttatgtgtctcttttttaaagtttttatctgtttcctattataaggttcaatttccactagaaatagacttgacttcccgtgacaaatttcttactaattcgttttagaaaaaagtttttaagggtattaaatatttcaatttgatttcaaacgtgacgaaaaacgagtcaatttgtcatgtttttttcctgtgatcctcgtattttggaaaaacaaagcagtttattttccaaataaccccttgttaaaaaaatcctcgactttttcaaaaaagtgaatggttttcactctttcttgaaaacataactttacaccggaatttacatttctaacaatgtttcacctgaaatttacaggagaaacaggcgctctttacaaacaccccctaccattagacatgcagacacgattaaaggaggacgagtgagaatgagtctatttaaacaggttcgatcaaaacttctgccggcggcagccgtatccgtgctgacagccggtctgattgcgggcgcggggcttcagcactccgaacaggctgcggcaaaaaaacagcctgacaaaaacgaaatcagaaacgtcatcttcatggtcggcgacggaatgggcgctccctatatgaacgcctaccgttcggtcattaacaaaggaaagccttcggatggtatgaaactgacggcattcgatcccaatctcaccggtatgatgatgacttatcctgacgaccctgattccaatattaccgattccgcggcggcaggcacggcaatggccacgggtgtgaaaacgtataacgcggcgatcggagtcgataaaaaaggaaagcgggtaaaatccgtcctcgaagaagcgaaacaaagagggaaatccaccggacttgtcgcaacttcggagattgcccacgccacccctgcggcattcggagcccataataaatcccgaaagaacatggatgacatcgcaagcagctactttgatgaccgtatcaacggaaaacagaaagtcgatgtgctcctcggaggcggcaagtcaaactttatccgtaaagaccgcaatgtaacaaaggatttcaaaaaagcgggatacagctacgtgacatcaaaacaggagctcaaaaaggatcgtaacaagaagattctcggcctgtttgccgatggcggactcgacaaagcaatcgaccgctcaaacgccgtcccttcattagaagacatgacaacggcggcgatcgacaggctgaacaagaataaaaaagggtttttcttaatggtcgaaggcagccaaattgactgggcgggacatgacaatgatatagtcggcgcaatgagcgaaatgaaggattttgaaaaagcgtataaagcagcgatcgcatttgccaaaaaggacaaacatacgcttgtcgttgccacggctgatcataccaccggcggattgacgatcggcgcgaatgacgataaaaactggcatgttgaaccgattcttgccgcaaaaaaaaccccggcatttatggctgaccaaatcaaagcgggcaaatccgtatcttccgtgcttgcgcgctatacagacctgaaatggtcaaaagctgaaatcaaacagatcgaaacggccgcaaaacagaatgctgacaagagcatctacaaagcaatcattaagctctttaatgcgaaaaccaacagcggctggacaaccggcgatcatacaggcgaagaagttcccgtttacgcatacggtccgggaagagagtcatttacggggcttttaaacaacacggaccaggccaaaaagatttttcacatcctgagacacggaaaataaaaaaaggatgcgggggtttccccgcatcctttcttcttttacagatatctccggtgcactcctttgccgtcatacgaaaacatcacttctctgtcttcaagaacagattcgatgtgcacgctcctgccccacagctggtacagatacggcagcactttctccaaatatttcagatcaagctcaattccctcataccaatgtttaatataaagctcattattcttcaggtaatccccgtcattgacggtcagataaggaaatcccccgttgacccgcatgttcacgagctgatcgcgcacggccttccattctttgtcgatcactttatagtccctgccctgcttttggaataaatacaaatcctcacgcatcacgagatctttcgtcaaataattgcggataaatgatatatccgattcaatttccctgacctcaaacattttctcgcgtccggaaccgggctttacccctgtttttttcatttcatctgtcgggttgtcataacgctcttcgatgtcttcaaaaattttcagccctaaataatacgggttgattcccgtttttgacggctgaacgacgcctgcgttcagcttcgcaaattcgatggcttcatctgaagtcaggtcaagctcgcggataatccgctgatgccaataggatgcccagccttcgttcatgattttcgtttccagctgcggccagaaatacagcatttcttctctcatcatggttaaaatgtcacgctgccacggttcaagctcccgcgaatgttcttcgataaacagcagaatatctttttccggccggggcggaaacggttttttcccttttttctttttcacctgcttcggcttatccattccccataaatcatcgtaaggcgatggcgcggtttcttcttcgtcctcctcttcgtcatcgacgctccacagcagcttcggcctgacgagcgacggatcgatatgctcctgaaccgccagaatggcatctaaaaaggactccacctcttttatcccgtgaattctttcataatgcttaatccgctccgccgcagccgccatactctcaaccatgtcccggttcgtattttgaaagcggcagttatgtttgaaaaaatcacaatgggcaagaacatgggctacaattaatttattttggatcagcgaattgctgtccagcaaaaaagcgtagcaagggttggaattaatgacaagttcataaattttgctcaaaccgagatcataatggagtttcatcttgtgaaattgtttgccgaaactccaatggctgaatctcgtcggcatgccgtacgcgccgaatgtataaataatctcagccggacaaatttcatatctcatcgggtagaaatcaaggccgaaacccttcgcaatgtcggttatttcctcaattgcccgctgtaaaccttttgtctcctccgcgttcaaccgaatcccccctacttggacttatttataatgtatgacccctcctctcaaaagatgaaataacagaccggtttccgtctgaaaactttcggcacatccgccccgtttgctttatatgtaagtgggtaaaacacacaccatactccaaaaagaaaaggagcgattctacttgaatacagcagacatgcttacgacgtatctcagcaaactcccgaatctgatcatcgcactgctcgtcctgcttatcggctggggcattgccaaaatcattgaaaaagccgtatacaaaggcctgcaaaaaacaaaaatcgacgacaggctgttcgccgaaaaaaagccggcgcgctattcctcagaaaaagtcatcagtaaagtcatttattttatcgcattaatcatcgtttttattctattctttaacattctgcatctgacaaccgtggcttcgccttttgtcagcatgctgtcagcgataacggcggctgtgccgagcattttaaaagccggcctgattctgctgttgggctgggcagccgcttcgcttttcagctatctcgtcaaaaaagcgggcatgaaactcgctgaaaacggccggttcagaaaatggacaatggtgtctgaagaagcggagatgagcagatccgttacggccgcttcacgaatcgttttttacttcgtcttgctcttgttcctgcccggcgtcttggccgctctccaaatcagcggagtatcagggccgtttacaaatatgatccaaagcgttttgtcctttataccgaaattattcgccgcggcgctgattgttttaatcggctggcttgttgcccgtctcgtccgtgatatcgtcacaaactttctggcgagtatcggcacggaaaggctcgccgcacgtatggggctttctatatacctgaaggatacaagcctgtcggcaatcatcggaacgattgtctacgtgctgattttcattccggtgatcatttctgcgcttgaccggcttgatgtggcgggtatttctgaaccggcgtcagccatgctgcacacggtcttcacaatgctccctaatatcattatcggtatcgtgctgatcatcgccggcatctggatcggaaaatgggtcaacagcattgtatccgggctcttgcaccgggccggtttcgactctcttctcggtaaaatgggctttgaacagacgggtaccccgaagctgacgctttctcagacggtcggcatgattgttcagattatcatcgtcctgctgtttacggcagaggcgctgcagcttgttcatctcgaatttctcgtcgttatcgcaacaggtattatcgcttacctgcctaatgttctggccgctgtatttattctcggaatcggacttttggccggacagctcgtcagcagactgcttgccggtatgctgagcggaaaggaattcagattcctggcgccgcttgcgaaatataccattatcactctttcaatctttatggcgctggatcagctcggtgtcgccgacacgatcgtaaatgccgcgtttattctgattctgggcggtttcgcgcttgccttcggactttcattcggtcttggcggaaaagatttcgcctcccgttatctcgcaaaattggatcgcaaaattgaaaaacatcaatcggctgacgatcggaagccgccgatgtcttaacgaaaaaaacgtgcgctcagaaggagcgcacgttttttttttgagttaagggggcaaattccttttttttcattttagattcatatatgatagactgtaacagaagcaaaatctcttttttcgaggtcattctatgaaattaacgaactataccgattattctttacgcgttttgatttttttggcttccagacattccgacgaactttccaacataaaagaaatcgcagatacttattccatctctaaaaaccacctcatgaaagtcatttaccgcctcggccagctcgggtatgtcgaaacgatccggggccgaggaggcggaatccgtttaggaatgacaccggaagacataaacattggagaagtcgttcgaaatacagaagacgactttaacatcgtagaatgctttgactcccaaaaaaatctctgtatcatatctcccgcctgcaacttaaagaaccttctgaatgaagccctgcaagcttacctggccgttttagacaaatatacgttaagggatctggtcaaaaacaaagaggagattatgagactgctcagaagctgaaggaatgtccgcattccttcttttttttatgccggcataagaaaaaaggactatttctattaatatgataaacgattgcagacaagtgccgatataaagattatcattactgatatcctcaccttgcggctgcaacgaatggggatagtaaaatcatcgcaggaaaagggagattcattatgagaaaaaaggtagcggtcggtttgactgcatctgcgatcgtcgggtctgcgttagctgtaacaccggcagaagcacaaacgattaaggttaaaagcggagattcattatggaagcttgcccaaaactacaatacgagcgtggatgccattacatcagccaatcatctaaaatccaccgttctttctatcgggcagacgctcaacattcctaacggcaaatcagatgccggcagcaaaaatccatcttcaaagaacagcggcacgactaaaagcgtttatacagtgaaaagcggcgactcgctgtggctgatcgcatctgattttaaaatgtccgtacaggaactgaaaaaattgaacggtctgacaagcgacttaatccgcgcgggacagaagctgcaagtgacggggaaagtttcctcaagcaccgatcagaaaaaaaccacgccgggcagcagctcaaacagcagcaaaaagcagtcatcatcttccgggacgtataaagtcaaactcggcgattcactatggaagatcgcaaacagcgtcaatatgaccattgcggaactcaaagtattaaacaacttaaaaacggatacgatctacgtaaaccaagtcctgaaaacaaaaggaacgtcttcttcgggaaacacgccgtcaaaggacaattcaaaccaaaataaaaaccagacgcaaacgtcctcctatacagtaaaaagcggagactcactctggaaaatcgcaaacgcatacaatatgacggttcagcaaatcagaagcatcaacaaactgacgtcagacatgctgcgggtcggacaagtgcttaagctgaccaaaacgtcatcttccggctcttcgacttcaccgtcaactccgaaccagtccggaaatacagggaaaaccactacatataccgtgaaaagcggggattctttatgggtgatcgcccaaaagttcaatgtgaccgcccagcagatccgcgagaaaaacaatctgaaaacagatgttcttcaaatcggacaaaagctgacgattaccgggcagcagacaaacacgactccgaatcagtccggcaacacaggcggcacaggttcaacaagcgcgaagattaatgtaatgatcgatgccgcaaaagctcagctgggcgtaccgtatgtatggggcgggacgacgccgagaggctttgactgcagcggtttcatttattacgttctcaataaggtcacttctgtatccagactttcagccgcaggctactggaatacgatgacatcagtcagccagccggcggtcggtgactttgtctttttctcaacttataaagccggaccttcccacgtcggtatttatctcgggaacggccagtttattaatgccaacgattcgggtgtcgttatttccagcatgaacaattcctattggaaacagcgttacctcggcgcaaaacgtttcttctgatatctgacaagctgtacggcctcaataaggctgtgcagctttttttacagtctgaaaatattaatgctgatcacgtgttttgttacgggatggaaatacacttcagcacgggatgaaaacgtttcttttgctgtttgcaccgttacgcgaaacacatctttcgtctgttcccggttcacttttgtacggcccatgtacgaataatcggtaagctcggcccccttgtattcacgttcaagctggttccatgcgagctgctcccatttttcaactgacggatcaaggtgttctgtatgccctttttcagcgatcgaggcaatgagaatgccgcaaaacaagagggcaagcacaaatggaagggatttcatctttatgttctcctgagtcgttttttgtcaatcttagcgtgtccaaagaagagacggatatgcggttttattttatgtctccctcatattgctatgccgctgtgataaggccaccaacttttcccccgttgcatcgggcttcgacggcataaactaacggagaacttctcattgaaaggagaagcgttagatggatcatgccgattatgacaaagccttgtattacacacaccggtctcaatgggacaatttgttaatattgatggttcgtacaaaagatgatttattatcaaagcgtattgagcactttctgcacgcgtatcatttcgaatatgatcatgcggtgcttgaaaaagagctgtattctcttctcgggtatattgatcatgcgacagagctcgcttatgaagatcaattagccatgctgacataaaaacaatcccggcgtcagacgccgggatttcttatgtttgtgaacatattcagctcttcgatcatctctttcaggctgacagccatatcctcagatacggtccggcgctccatgtcgatgtgaatcgggtctaagaccagctgtttcgggatgacatttgcatagacgccccgcatgaccgtccgcatattcgccagcgcgttcatgcctccttttcctccgcccgccgcggccatgattgccaccggtttgtatgcccagtgatcgctgcttaaaaaatcaatggcgttttttaaagcgccgctcatgccgctgtgatactcgggagataataagacgacggccgccgactttttcacctgccgccttaactcttgcactgaaggcagctcgttctgttcttcttcaccgttataaagcggtagatcactttcgctcaaatcaataaaatcggtatgaaaccgatctcttatataagaagcggcaattctagtccgcccgttttttctcggtgtgccgctgatcactaatatgctcatgattttaccgcctttccaaaaacattatattttaccgcatacaatgccgcctgcgtccgatcggaaagattcagctttgacagcaggttggacacgtgggttttcactgttttttctgaaataaacagtgccgccgcaatttccttattgcttttccctttggctatttcttgaagaacatctttttcacgtggggtgagctgatcatatttttccttatcctgatcatcctgaaccatatgggtcagcacgtgaggcacaatatccgccgacagccggtaacgtccggaatacacttcccagagcgttttcactaaatcatcgggctgggcgtctttcagctgatacgcttttgcgccggctttaagggcgggaatgacatgctcctgatcagaatagctcgtcaaaacgacgatactgatgtccggaaatcgttcagccacaatttttgccgcttctatgccgtccatatcaggcattgataaatccatcagaatgatgtccggctccgtcttttcagcttgctgaagcgcttcagcaccggtggacgcctcaccgacaacttcaatgtcttcctgagtggcgaagaaatagcgcagtcctttgcggacaacgtgatgatcatcagcaatcacaattttcatcaatcagacctcctgtcccgaaacggaagccgaacggagacaatcgttccggcgccaagctcggattgcaatgtaaagcggcctccgattgcttcggcgcgcgctttcatgccggtcacgccgagcgacggcagccccgtatgcgtatctgcgctgaagcccgctccacggtcgctaatatgaagctccgcgcaatccgactttttaacggcggaaatgataacccggtccgttcccgcatgctttttacagttattcaaggcttcctgggcgatccgccaaagcgcgtgttcctgttcatccgtaagctccagctcatcctccatttcacaaacggcttccaggccgataagagcggcatagcttttgatcgacgcatacagccctttcgtcaaactttccggcttcagctgccaaataagcgccctcatttctgttagcgcatcctgagacagctcttgaataaacgtaatcatctgccggagccgatcatcatctgtaaagctctttgcggcttttgccgttaagctgacagaaaacagcatctgattgacggaatcatgcagctcttgcgcaagtctgcttcgttccatcaacagggcgttctgctgctcaaattcggccaatttcatccgctgaatcgccgttccgatttgaaatgcaaccgcttcaagcagatgcagttcttcttcgttgaaaaatgtcttttcgcttgcggcgacgtttaataaaccgaacttccggccgccgtcctcaagcggtacggtcgcatgatgggtaatgccctccgtatcgcggcagttcgtcgtctgttccgcaaattcaatccgtttacaattcattatgtttacggcctttgtcaatccgccattgctgaatttggtcagacaatagcattccccgctgcacatgagtgcattttcccgctgaccgagagccggcggtaaataagcggatgcggcgagcgtataagatccgtccggctcaatcagaaaaatccaccctgtctgcagcccggtcaggctgagcagttcgcgaagcactttatcaagcgcttcctttaaatcgtggctttggtttaaggtttccgcaatcgcttttaacgtttttaacgtttctaccgtcgttttcgtcaatttccctcactccggccaatcagaattatccatattatatcaattcttttctgtatattcctttgttttcagcatgaattttcctcatactttcggatgaggcgtataaaaaaaccgccggatgtcgcttccggcggtttgttgtttatttcgttttttccactatgccatccaccgttttcatgacagcttcagataatgcggcaagacgctgttcgctgtcttgtaaagaagttcccttcacggcgaaatagaacttcactttcggctccgttccggatggacgaaggcagaaccaagagccgtcttcaaggaaatatttcaggacatttgacttcggcagatcaatatcttcttcatgatgatcggcaaatacagtccgttttcccgttgaatagtcttcagcctgcgtgatttgttttccggccatctgcttcggcggatcgtttcggaaggaagtcaggatagcggaaatctgctctgctccctgttttccttttaacgtcaatgacttcaagccttcacggtaataaccgtattctttaaaaatggacagcagcgcgtcataaagcgacatgccctgctttttataaaaggcgcatacctcgacggctaacagcgcagcctggatcgcgtctttgtcacgcgcgaaatcgccgattaagtagccgtagctttcttcatacccgaactggaacgtgtattggcctgatttttcatattctttgatcttttcaccgataaatttgaagcctgtcagtgtgtcaaccgtatctaatccgaacgatgaagcgacggcgcggcccaattcgctcgtgacaatcgttttcatgacgacaccgttttcaggaagggcgccctgttttttcttctcggaaagcaggtaatgcaataaaagcgcgcctgtctggtttcccgtcagcactgtgtacttgccttcgctgttttttaccgcaatgccgagacggtcggcatccgggtccgtagcgacgagaatatcagcgttttgttcttctccgagtttaatggcatattcgaatgccgcgtgctcttccggattcggcgatttgacggttgaaaaatccgggtccggcagctcttgctccttcacgacggtgacgtttttgtaaccgagtgcttcaagaccgcggcgcaccggtttatttgccgtgccgtgcagcggagtgaacacgacgctgacatccacttcatccgaaagctcgggatgtacggagatggaagtcagttcttcagtatatggtttatcaatttcttcaccgattattttaatcaaacctttttctttcagcgactgttcatcttcaacttgaatcgttaattcattttctatggcattcacttccgcaatgacgatgtccgcttctttcggcggcagctgtgcgccgtcatcgccatacactttatatccgttatattcaggcgggttatggctggccgtcacgacgataccggcataagcgttcagctttctcaccgcaaaagacagctcaggcgtcgggcggagctcatcaaatacgtatgtttgaatgccttgggaagcaagggtttttgcagcctccatcgcaaactcaggagatttatgacgggagtcgtatgcgatcgcaacccctctttttttcgcgtcttccccctgtttcgcgatatacgccgcaagtccggcggatgctttgcggaccgtgtaaatattcatcctgttcgtacccggcccgatttctcctctcatgcctcctgttccgaactcaagatttttgtagaaaaaatcttccagcagctgctcgtttccttctgcgtccgccaataattttttcaattctgaatctaattgttcggcctgattccagcgttcgtaactcttactccaactcatgttcgtcctcctataatttcagcttatgaccatattttaatatgaagcggctgcccgtgtcacttgataacttaaccaaatgctttatgtaaaaagataaaagaagggctcatgccttttcggcacagccctccggttattattgttcgagcggaacaaccgcgtcgtgcagcagcgtatttaaccactcagtgtgtttttctttcgtttcgtcattccattggaatcggtcgctcatgtaatcaatcacggctgttttatacgtttgcacccatttgatgtcgaagaacagtcttcccgttctgcggacgaagaaatcggcaggtgtcgcagccatttcttcttcgatgctgtaagccgcttccgccagaatgtgaaccggaatctggcgtttttccgcttcgtctttcagaccttcaatccggctgaatacattttcaacgttagagccgtatctgatggctaactgcttagcggtttcctgtgataaaccgattttcaagccgtcttttgtctttgcttccacaaatgactcgaagtttttagagccgccgacatgtccgccggaaatcggcatcgtcttcgtcttgcagccgccgaagtcctggccgccctcttctttcaagcggtcgcggacaagatcgacaatgtgctcagccattttacggtagcccgtcagttttcctccggcgatcgtaatcaggcctgattgagatgtccagatttcatctttacgggagatctcagacgggtctttcccttcttcgtgaataagcggtctgaggccggcccagcttgattcaatatcgtccgccgtaatgttcagttccgggaacatataattgatggagctgacgacataatcgcgatcctgcaccgtcatccgcgggtgctcaagtttttgtttgtaaaccgtatcggtcgtacccacgtatgtttttccttcacgcggaatggcgaacaccatccggccgtccggcgtatcaaagtacaccgcctgtttaagcgggaatacggattggtcgaatacgagatggaccccttttgtgtgctgaagatgttttccgcttttgctgtggtctttttctctcagctcgtcgacccacggacctgtcgcattgacgatttttttggcgtaaactttgtattccttgcctgacagcagatcttcaattaaaacgccgacaacttttcctttttcataaagcagttctttcactttagaatagttgacaggctccgcaccgaatttaacggcttctttcatgacttcaatcgtcagtctcgcatcgtccgtccggtactctacataatagcctccgccttttaagccgtcttttttgacgagcggctctttttgcagcgtttctttagcagacagcatgcttctgcgctctgatttttttactcccgctaaatagtcatacacacgcaggccgatggaagtagagaatgaaccgaacgtgccgcctttatgaaacggcagcagcatccattccggcgtcgtgacgtgcgggccgttttcgtacacgatggcacgttccttaccgacttctgcaaccattttgacttcaaattgcttcagataacgcaaaccgccgtggacaagctttgtggatcggcttgatgtgccggccgcaaaatcctgcatttcgctcaaagcgactttcattccccttgaagcagcgtcaagcgccgtaccggcacccgtaatacctccgcctataataaacagatcgtatgtttttttagtcatgtcttccagcatatgatcccgttccaaacttgaaaattggtgattcatcattacgtttcctccttgttgtcacggtatagaaaaagagaccacaacagccaaagcgcatgtcatcactttggtgctgtggtctctcctcatctcaggaccgttcctattaacttgttttcagtataccacatttttatcttatttaaaagccatagctgcatttactgcttttttccatccgccgtacaattcatcgcgtttttcatcttccatttccggtttgaattgcttatcaaggttccattgatcagcgatttcagtgctgtccttccagtagccgacagcgattccggccaaatacgcagcaccgagcgccgtcgtttcattaatttccggacgttcgaccggcacatcaagcaagtcgctttggaactgcatgaggaagttattttttaccgctccgccgtctacacgcaatgtttttaaagagatgcctgaatcagcctccatggcatcaagcacatctttcgcctgataagcgagagattcaagcgtagcccggataaaatgctccttcgtcgttccgcgtgtcaggccgaaaactgagccgcgcacgtcactgtcccagtacggtgtgcctaatccgacgaaagcgggcacgacataaacaccgtcagcggaatccacacgctctgcgtatgtctcgctttcttttgaatcttggaacatccgcatgccgtctctcagccattggatggcagaacctgcgacaaagatgcttccttccagtgcatactcgacttttccgtctaatccccaggcgattgtcgtcagaaggccgtgatcagaagtgatggctttttctccggtattcatcagcataaagcagcctgtgccgtatgtgtttttccccatgccttcttcaaagcacgcctgaccgaacagcgcagactgctggtctccggccgctcccgcaatcggaatgtttttaccgaagaaatgataatcaaccgttttcgcgtacacatgagaagacggtttcacttccggcagcattgatttcggcacgcctaaaatatcaagcagctcgtcatcccattttaattcatgtatattaaacatcagcgttcttgaagcgttggaataatccgttacgtgcgccgcccctccggacattttccagatgagccatgaatcaatcgttccgaacagaagacttccgttttccgctttttcccgcgcgccttctacattgtcaagaatccatttgactttcgttcctgagaaataagggtcaatcaaaagtcccgttttttctctgaatgtatcattatatcctttttcacgaagctcttcgcaaatgccggatgtttgtctcgattgccacacaatcgcattgtataccggctttccggtatctttatcccatacgaccgtcgtttccctttggttcgtgatgccgatgccggcaatttgatcagcgctgattccggactcggagatcacagtcgcgataacggcgagcaccgatccccagatttcgttcgcattgtgctccacccagcccggctgagggaaatgctgtgtgaattccttttgagcggaatgcacgatttttccttctttattaaaaagaatcgctcttgaacttgttgtgccttggtcaattgataaaatataggtctccatgatgccgctctcctttttaaatatattcagaatttgataatgttttccgtgattgagatttcttggtataaagataaagtatgaaaagcacgataaccattataacgcttacaaaccaaaagctaggtgtcacatttcctttaaacgcggcattgtaaaatacgccgccgaacgcaccgcccatgatcggaccgactacgggaatccaggcatatttccaatttgacggcccttttttcggaatcggcaaaaaggcgtgagcgattctcggccccaaatcccgcgcagggttgatcgcatatccggtcgtccctccaagagaaatcccgatggcaacgatgaggaatccgacaatcagcgggttcagcccttttgtaaattcattcgctccgattgccaaaatgccgagcacaagcacaaacgtaccaatgacttcacttatcatattcccaaatgtatgaggaatactcgggccggtcgagaaaacgcccagtttagcggccggatcatccgtcgccttccaatgcggcagataatgaaggtacacaacaaccgcaccgatcattgctccgatcatctgtcctgcaatataaacagggacctctttccaaggaaagctgccttcaagcgcaaggcctatcgttaaagccggattcaagtgggcgccgctgatgctgccgacggcatatgccgccatggctactcccaatccccagccgaatacaataacaatccatccggattggtatgaaagcgatttctttaaattgactcccgcacaaacgccgccgccgaaaataacaagcagcattgtaccgattacttctccccaaaatgctgtcatcatcattcctcctaaatgacataatagcaggtttgacagagttatagagaataaaaaacccacaacaaaccgctttacgctttattgcttccgtaaagagctgttgtgggtctccgggtctccatcacatagtattaacctaggtctattgtaacaatgggtgtaagcggtgtcaatctttttttgtcatagaatgttcatatttagcccataggtcggtgtctgaagtcgtcacggccgtggctcctgcctgcaaggcgttttcaacgtcctgctccgtgcggatgaagccgccggcaaaaatcggaatccccgtcatttctttaatttctctgattaaagtcggaacgatgcccgggagaacctcgataaagtcaggcttatgctttccgacgaattccatgcttttctccatggcgctcgtatccaagagaaacagacgctggatcgcgtatattttcttttgtttcgctttgacgatgactgatgatctcgtcgaaatgatgcccgcgggccggatatcctggcaaatgaactccgcaccgtattcatcatgcttaatgccgtggattaaatcgacgtgaaccatcagaagttttccgtgttttttcgcttcattcacgacaccttttaattgaccgaggtggatatctaaaatgacgccgtataagaacggactttctaaaaatgcatcgaattgcttcatgttccggattgccggtagaatctgctggttgtgaaaactcatgttttactcctttacattaaaaatcaatgctcagcacgctttccttgacggtcgaaatgatgaaagagagctcctcgtccgacaggcaaaaaggcggagacagctgaatgacattattatatcccgctacagtatcgccatttttcccgacaagcaggcctttttctctgcacgcggtgatgacgtgctgcacaagggcggcatcagcgggttccttcgtgattttgtccttgacgagctcaatgccggcaagaaggcccttgccccgtacatctccgaccgccggatgttctctgagcggctcaagctcacggagcagcctttctccaagctcccgggagcgggcgatcagattttcgtcctccatcaattgcaggtttttcaaggccagggcgcaggctgccggattgcctccgaatgtattcacgtgccggaagcggccgtacggctcaccgcccgaatacgcctcaaaaatctcccgttttactgccgttgccgacagcggcagataagcgctcgtaatgccttttgccattgtgacgatgtccggtgaaacgccgtaatgctgaaatccgaacggctctcccgtgcggccgaaaccgcaaataacttcatcactgatcagaagcgcgccgtggcggcggcaaatgtcctctacctttgccatatacccgtccgggggcatcagtatccctccgcctgtaataatcggttccataataacgccggcaatcgtttcgcttaactcccacgtcatgatccggtcgatttcatgcgcgctttccaatgtgacggcatcgccgggattccgatagagatcaggcggcgccgcgtgcaaaaaaccttgtgagagcggctcatatttatattttctctgcgcctggccggtagcggcgagcgcccccatcgtattgccgtgatagcctctgtaccgggagatgaatttgaagcggctgtgatcgccgttttcaatgtggtattggcgggcaattttgaacgcggtttcatttgcttccgatccgctgttggaaaagaagattacataatcgccgccgagccattcattcaatttttccgcaagctcaatcgcgggttgatggctttgggtcagcggataataaggaagctccttcaattggctgtaagccgcatcggcaagttcctttctgccgtatccgatattgacgcaccacaggcctgacatgccgtccaaataccgtctgccgtcaatgtccgtaacccaggcgccttcccctttttggacgattatgctgtcatccggctccgcccctttcatcgcgtgccaaatcagctctttatccttttgtttgagtgactgatttttttgtacatgttccacaccgctcatctccctttcaatatcattgcactgtatcgaaagctgcccggcttctgacgccgattctcttggtgaagttttcctcttaataagaatataaaggcgcggcatgggcgagtcaataaagcggcggcaattaaaaaaacgctttctcccagaaagcgaaagggctacaagagcatatcccgaaaccggggccggtgcaagtgtttttataaaaaaacccgccccttagggactgccccccgtttttgagacaggggtcaaaacaccttttaaacagccaattgccgatagtttatcggtgattggttgtttagtttggtttgaatacgaatattgttataataatgaatgtattctatgacagtgcgttctacgatggcagtcgtagttcgatcaatgctgttaagatagaacgtttcagactttagcgaggaatgaaacgattcgatggaggcattatcagcgggcgtccctttgcgggacatgctcatggtaatgccttttgttttaacagctttttgatactcgtaagatgtatacacagaaccttggtcactatgtaacacgcagttctcaggcagcattggtagctgatcaagtgtgtctaagacaaaggctgtgtcctgcttatccccaatagtaaaagcaatcacttctccattgtataaatctaatatactggaaaggtacaattgtttctgtccataaggcaaatatgtgatgtccgttactagtttttcaagaggacgatcagactgaaagttccgatccaatatattatcgaccacggcatatggctgcccatccttcttgcgctttttcaccttaacccgacactgccattgatttttctgcataatacgttgaaccgttttatggttaatacacattctcttttttagtatggctgtgatttttcgatatccatatcgatacttgtgctctcggcacaacgtgccgatttgtttttccaaatggcgcttgggatgatccttcatcagattcttcttccaacgataataagacgctcgagagatacctaaatgaatacagatatcctgtacggtcattgtgctgtgcaatatttctacaagttcgactgacgtttcgctatcaacttcctttccaattcgttgtacttttttaaaacttcattctgttgtctcaggtaacgaatctctgcctgcagtttctctaaatcggaagaatactccggaccttttccgtaagtgtattgctttccaacaggctgttcgaatcgatgtgtatcaccagccttataccatctaacccatgtctgaacctgtgtcttattcttaatattcaactcctgcaggatctctttcataggtacgcctgccaatctcatttctacagccttctgtttcacttcaaccggataactcactcttgtccccatagaaaaaacacctccaagtctaatttcggataacaatcatccgtattcaaacttgaaggtgtttttatttgtctcatcttatggggtcagtccccttaagcggagcgggcgttttttttatttcagatgcgtaatccggtaaatgtctttgcgccggtctttcagctggcgcacggttccgttttcacgctgccttcttaagatttcaaggtccacgtccccgatcacgaccatttcgatattcggattcgtttcaccgacgattccgtctctggcaaattcaaaatcagacggagcaaaaatggctgactgcgcgtattgaatatccatattttctgtttgcggcaggtttccgaccgtacctgagatgacggtgtaaatttggttttcaaccgctcgcgcctgagagcagtaccttacgcgcaagtagccttggcggtcttcagtgcagaacggcgtaaagataattttcgccccttgatccgcggcaattctcgcaagctccggaaattcgatatcgtaacagatctgaatggcgatctttccgcagtccgtatcaaatacgcgcaccctgtctccggcgctgatgccccaccatttccgctcattcggcgtaatgtgaagcttatattgtttttcaatcgtgccgtcacgtctgaataagtacgcgatgttataaattttcccctcttcttcaacgaagtgggagccgccgatgatgttgacgttatatttcaccgcgagatctgtaaagaggctgatatagtcctcggtatattcggtaatcctctgaatggccagactcggagaacgctcctcgaggaaagacatgagctgcgtcgtgaaaatctccgggaacactgcgaaatcagatctcgcatcggaagccacatcgacataatattcaacctgattggcaaattcctcgaaggagtaaatctttttcatttcatattgaatgacgcagatgcgcaccggaaatgccgatttgtaatagcgcttcgattgcggcaggtaatcgacattgttccattgcattaatgtcgcatatttaatggacgcggtgtcatccgggagataattcggattgatccgcatgagcgtaaatccgttcatcagctggaaagaaagcaccggatcataaatctgatggcgcgtcacctgttcgacataagctctcgccgtcatttcttccgcatacttatgataattcggaatccgcccgccgataatgatgcttttcagattcaatcgtctcgccaagtcttttctcgcctcatacagccggtgtccgattttcatccgtctgtattccgggtgaaccattacctcaatcccgtacagattcaatccgtccgggttgtggttcgtgatataaccgtcgtctgtaatgtcctgccacgtgtggcggtcatcatattcatcgaaattgatgatcaggcttgagcatgaaccgataatttccccttcatactcggcgcaaaactgaccttccggaaagtgcgcgagatggctgattaaatgctcaggctcccacggctccatccccggaaaacaatccttttgcagctcaataattttgttgatatctttctcttccatattccggatgaccattttcttttcaaaacgggtcagatcaagtttctcagacaatgctgcttccccctgccgtttcgttttgatcgttcaatcgctgtaagagtaattcaagttccatttccgccatcgattccagtctgtgatcgtattcttcaaataacagggcgcttgttaccttattcgggacgatgacacatttcatgccggcccgtttggctgcgattgagccgttgaccgaatcctcaaaggccagacattcagatggttcaacgcctaaatgttccgcagctttcagatagagctccggattcggcttcacttcttctacgtcgtcagccgtctgaatcacttcaaattcatcaaacaggcctaattccttcagatggcccgatacccatttaaaatctgagctggacgcgagccccactttcaatcctaattcttttgccgcggctaaataagcctccaccccgggacgcgccgtttccgtcttcatccgctgttcgaagcgcccgcgcctgatcgccgtcagttcatcatgatcgagctttcttcccagctgctcctctaaatatgcgaacggcttaaaccccgcggccgttccgatcacctttccccagacggataaaggcaatgttgaaccgtgttcttcaaacatttcctgcagcacttcatattcatgggtttctgtatctaaaattaacccgtcaaaatcaaagattaatgcttttatcaatggttacagctcctttagctaaacgtactgacctatgtatacactataccgtgaatttctttcgcgttcaaaatgtaacattctcacggaaagaagagcctgcatgagtgcaagctctcttcatccgttactgtgtgttttgactggaaatattggaaagagctgctcccgcagactcatttgaacgctgatcgaccgctaagtctccaagcgcaacgatcccgaccagatgattttgatcgacaatgggaaggcggcggatttggtgttgggccatcagatgtgacgcctcttcaagactcatttccgggtttccggatacaactgcagaagacatcacgtgtgaaacaggtgtttggccgtcgcggccttgagccgttgttctcaatgcgatatcacggtctgtcagcattccttttaattcccctccgtcaacgacgggaattgctccgacattatgctggtgcatcagcgcagccgcttcctgaatcgtttgattgggagaaacggtagccacgtgggtagtcattgattgtttgattgaactcattgtaaagcacccctttcgacatttattatgctcggggatttgtctcattataaagggagttagaggaaagaaattgtggtatcatgtcaaggaagcaaaaaagagcctgttaaaaggctctttatacccgtcagatcagccttctgtgaccgcaggcatctgatccggcccctgtctcgaaatcatcataggtaaagggaaaattcattccgcattcattcagcaaagcgcaatttttatcaaacagcgcccgctctttgacgtcatataccgggtgcggctttgacagcatgatatgtaccgtttgcagacaagccataatttgaaacgcttcttttaaagttccttggtaacgttggttttgtaatgataatacgcccctttttttaaagcgctgaatttccagttcggagaaataaagaggaaagacattttgaaacaattcagaggaaagctcttgtatcgcgctttcttgtccgtcagtcgctgcgttcacaattctcacatcaatcacctttcttgccatgtgaatatccttaatctttatcaagaatagcatagaaaaaaacgcgaaagctaaggtaagtgtttcctattgaaacagccgctttccgcttgaaaaggagctttatgatatgaaacaaaatgaccgcggtctggaactcctgattacggaaaagcacgccggacaatggctgttttcagtcctgaaatctgaattccaggcgtcaaaacccgtaattacggaatggatgaaccaagaaagcattcaggtgaatcgaacatccccgaaaaacaacatcatactgaaaaacggagatcgcttattcattgatcttcaggaaaaaacgggttcttcggtgactccggaatacggagagccggacattttatttgaggacaatcatatgctgattgcaaataagccggcgggaatgccgactcatccaaatgaagagggtcagaccggcaccctcagcaacctgatcgcttaccattttcaaatcaacggcgagcaggcgaaagtgcgccacgttcaccgtcttgaccgtgacacgtcaggcgcggtcgttttcgcgaaacaccgcctggcccatgcactccttgaccgtcagctcgaaaccaaaacattaaaacgcacctatatcgccgcggcggaaggaaaagtcacgccgaaaaaaggcacggttgactcgccgatcggccgcgacaggtcacattccgtcagacggcgcgtctcatccggcggacaagccgccgtcacccattacaaagtgaaaggctatcatcccggtgcgcagcttacattggcagagcttgaactggaaaccgggagaacacatcaaatcagggtgcatatggcaagcatcggccatccgttggcgggcgatgacctgtacggcggaagcaggacgctgtttcacaggcaggcgcttcacgcaaaaaaagtcagtgtcgtccatccgatctcaggagaagaaatcgttgccgaggcgccgatgccggctgatctggctcattttaccgaaacgtatttttcttaaacagggtcggcatatataatatatcgtttcggcgcatttccaatgtaagaaaacggatagcaagtggtcaggatcagttcctcccgcttgtgctgaagggtgatgacagatgtatcatcccggctgacgatttttgtacggctgattttataagaaaacgtgccgtaagacaaaatcacgttcagtctgtctccttttttcagttcgccggtccggcggaacaccgtgtccctgtggccggataacacaatttggccgtgatcgcccggataatagctgtccttataatgtccgacgccttttgctaaatcatctgcgtcagtcccttccacgatcgggagctcagcgtcgatttcagggatttctaaaatgccgcttgcctcacccgtttcggggtgaaattcttttttgcgctgtgtcagcacagcgctttttgtttcgttcttttccaagacaggttctgttgctttttttgcttcttcaagcgaatggttcgttttcatatgtgaatcaatgatcttccagcttccgtaacatgtgatgatgataccggcgatgatgacgaaaagcggaataagtttcagtttgttcatcgtgtgcgggttccccttttctttctgaaaagccaatatacgccggcacccgtgatcaccagaccggccaatgccgtctgatggctgcccgctgaagtatcaggcaatgggcggcctttttgtgtgccgctttcagtctgttttgtgctttgttccgaatttgcggcagacgccggacgggattcgggaattgactccactgtatcagatgctgtttcttttacgacaggacgttcaggttttttggtttgatcaggctgttctgctgcatccggtttttccgcttgaggtttttctcctttatcaggcctggtaccgcccggtgtttccccgcttcccggctgattgccggtgtcatcaggtgtttcggcggctgatgccgtgcggatgcggccgtcggtttgataagaaatcggtgcggaaaagcttttgacatagtctactgtcgcttccaaatcctcaggccccgtcaccggattcttgccgagtttcccgatcggaccgtattttgcccccgctgccgttgccataaattgattgactgttactgtatatcctttttcgggctgtatgtctgtcccgtccgccatcttcatatcaaccgcttgtccggtttccgggttccatgtataggaaaatccgctgatgctgtaatccggaccgtacaccggagaaatttgcgcgttaatgatctcccgcaaatcttttcctttgatttcaagcttcgtcagcacattgccgaacggctgtacattataaaggtctccccatgtaatcggccctttttttatgccgtcccggatgcctcccccattcataagcgcaaaatcggatttcatcttctctttcataccgtcggcaatcagatttccgagcgccgtgtcgccgtcatttgaatacccgcccgttatatcatgagccgcttccccgaccgcttcgctgataatcggtttcactttctcttcatatttgcttaatatgcctgccgcagccgggtcaggcttgattttactttgatcgatatattggatttccgctgattttttcacgatatccttcgactctttatcaagttcaagatcggcgattccgattgcttttccgtattcaaatgcctgcacgatcagcttgccgtcgatttctccgtttacgactttatgattgtgcgcggcgaaaatcacatcaatctctgagtctgttccgcttgcaagctttgcggattctcccgtgatggctgagccattttgttcagcagacatatgggcgagcacggcgattgctttaattccttttttcttcaggtcagcggcggcgtcattgacggcctttacctcatccgtaaacgtaatatttttaattccgtccgggatgaccatgcctgccgccgatctggttacaaccccgataaatgcgaccggaattccggaaacgtatttaatttcatacggcggcagaaaggactcccctgacttcagtttacagttggcgcagacgagcgggaaattttggccgtcataaccgcttgtccccttaccgtccggatgatctcctccattgatgatccgtttaagctcattcgttccttcatcgaattcgtgattgccgacagttccgacatcaaaaccgatgtcttccatcaattctactgtcggttcatcctgaaaaagggctgacacgggagagctgcccccgatcatatcgcccgcatgcacgacaaaggcgtgttctttctcggctttcgcctttttaatgtacgctgcggcgtagtccatccgcccgaaagtgccatccggtttaccgtctccgttaaggtcaagctcatattgctgatcaatttttccgtgcagatcattcatactgatgattctgagcgggacacggccggagtcttctgtctgctgttctttatacgctttatccattccagcttcattcagtgatcctgcttgtccgattgcttccgcatctttcacgctgaacatcataaaacaaaccgtcagcaaacagcacgtaagacgcatacccctttttttcttcatttatttcccccctgtcttctaagaaatacgttagcttattttcttaaaaatcacatcacttttttgtaaagattgtcttcactggcgcaaaatagtaaataatccccacgtaacgaaacaggtcttgatgtataacggatcggcttttttcacatcttaatgatgatttgacatgaaggaggaaaacaaccaatggaacagcagcagaatcagcagcagccagtaaatcaggggatcccgggttcaccgcaagtgaatcacggaggacatgagcttttcgatatgcatgaagtgctggccggaacagtcggcgttttggatcaatttatgatgctcagacagtttatacaggatcagcagctggccgacatccttgaccgccagtatcaattcattctcggactctataatctgacggcagaatgctttaagaccggccaaaagccttctcaggaaacgtcgacatatatgatgaaggaacagaaccaggccgtctacggtataaaaccgactcagccgaaaaaaccgaatcaatcattaaatgatgtcaaagatctcgggatcagcggccatatgctcggcctgattaaagctcaagcttctctcttgacgatgagctcgcttgaaatgaccaatcccgtcactagaagagtgctctccgcccaaattcagcaatatgtcgaaatggcgtatgaaatcttcttataccaaaacaaacacggttattatcaggttcctcagctcaatgcacaagatatgcagaccatgctgaattcatttgcaccggcccagggacagccgcaaatgcctccgattaaaggacaaatgggacagcagcagcaaaacctccattgattaaaaaacggcgttggaaacctgactctccaacgccgttttctttttttcatatgcttttgtgaaatcatgttcaaatcgtttcaggctttctttcgtagccgcttcaaagcctttttcaaaatcctgtgtttcggcggttttattgataatggttaagataatgccttctccgaatgtgtcggttaagtcctttatcatatagaagctttgcaaatagacatccgtttcatattccatacgcgatttctgccattttcggtcggtcgttaattgatcaaacggcacgacggaaaatgcaatcggatcaatgactacatcataatgcgcgacccactcgctcagcccctcatgaaaccaaagcggaaatacagacgtatccgtccccaattgccgcgttttttgatgaaacgcgtagtgtgtatattcatgtataatcaattgcttatacatgaaaacggccagctcatcttttttcaaaagcttttttttctcttcaggcaaaagccccatcatctgctcctgttctgaataaaaaccgactacatttttcaatcctgaatattgctccatttcagcttcatccgaaaagaaaatgagttcaagcggcgctgcacctttatagccgacaatgatttgattgatacgctttgcgtggtccagcgtaagcttggtcagatccaagagcggcttttcatccgccgtatagtaaatcgctgtatgtttgtaaatttctttattcatgtgttcagtcacttgttccttcgtcggaacagagcggctgttttggcctgacaggacgtacatcatacttactgaaacggctgaactgacagccaatatgacaaggactccgcacaggatcagagtgaatgccgcccgtttccccatgccgtcacgcaaacaagctcccctccccgatcctttcattttcatctcattctttactttatgctcaggagcgctgggtcgtgacggcagataaaataaaaaagccgcagcaaatgcggcttttccattcatttatttattggggtttgggaatacacgctgcaccatttggccgaattcatcaaacagaccggatacaggatgtccgttttggattcgttttccgtagccttgcatgcgttcaacgaagtccgggttcgctgatacatatacagtccggacatgtttatcggctgatttcaccttatcggtaatcttattttttaaatggttggcgatggcgcctttttgcccgtttgtcaaaacaacggcaacatatgcgctgtttccggcaacgatcacagtcgcatttttaacctcttttaaatcagtcaccttgtcggcggctttatcagccactctcaggttacgattgtcattgtgatcgttgttttggttatgacggttcactgtattcatatttgtcgcaccgtcgttaggcgtgttgcggtaatttacattctgggtgcggttgtcatttcgttttccttctccttggttccccatactgcaccctgcggtaatcagcatcggcagaagaagggcagagataactgcttgtttttttatcatgtgaattcctcctttctcactttacgtataggtttttctattcggcgggatttatgcacgccgtttgcattctgagcggtttggataaatatcagaaggaaagggaaaggtaagcgtaatcaattgaatgaggagggatttaacttgttcagaaaaaaaagcggcatcagcccgacagcgctgctgatcggatcatcgattctgattgcagctttatcacccgaaatccgccggaaaatctccggaatggtttcaggcagaatgcagcataaagatggcacacactccatgcagcctgttgacctgattcaacaggcgttcggcggggaatccggcggacagcagcacgcagacaaagcccggcattcacaaaccggctcattgcagcctgccgagctgatcaaacaagctttcggcggggaatccggcggacagcagcacacggacaaagcccggcattcacaaaccggctcattgcagcctgccgagctgatcaaacaggcgttcggcggggaatccggcggacagcagcatgagcagacttcccgcaatcacgccggctcatcccatacggacggacaggcagaccgcagccgcagtaaagaaacttcgccgaagcctcactataccgagccgattcactttgaagaaagcgcggtaaatgttttaaatgacagcaccgtgatgaatatgctggaagaaattgaacccggaaatcattagaaacgaaaaaatccttcattcgttcaacgatgaaggatttttcgttttagcgctttatctcatatttttctataagagaatgaaccatcgatctgcttttttgttaagcttcttcagcttcaatgacgattgtggaatcattgtataccgcggtatcggtttccttcgtcattttacttgttaacagccctgcggtcatactgccgctgacatttaaggcggtgcgccccatgtcaattaacggctcaattgagatgagcagcccggcaagcgccacaggcatgttcaaagcggataggacgagcagagccgcaaatgtcgcgccgcctcccacgcctgctacaccgaatgaactgattgccacgatggcgatgacggaaatgataaatcccggttcaaacgggttttgccccactgtcggcgcaatcatcatcgcgagcatcgccggataaatgccggcacagccgttttgaccgatcgataagccgaatgaaccggcgaagtttgcaatgccttccggtacgcccatgcttttttgtgttttaatattgagcggcaaagcccctgcgcttgaacgggacgtaaacgcaaacaccataaccggaaatgcttttttcacgtatgtgatcggatttaaaccgctgaacgtgatcagcagcaagtgaatgataaacatggcgataagcgcggcgtatgaagcgatcacaaacatccccagtttcgcaatgctgtcgatgtcgcttgtcgcgatcgttttggtcataatcgccaataccccgtaaggcgtcagtcttaaaattaatgtcacgacgcgcataataatcgcgtaaaccgcatcgacaattccgctgaatgtcgctgcgtgctccggctgcttccgtttcacgcccagaaaagcgatgccgaggaaagcggcgaaaataacgactccgatggtggaagtcggtctggctcccgtgaaatcaagaaacggattccccggcagaagctcaacgatttgctgaggcagcgttttggccgtcatatcctcagatttttgctgcagctcctgaccccttgataactcagtgctcccctggtcgatatgaacggctttcagatcaaaggaaagcgccgaaacaattccgactgccgcggcaattgctgtcgtagcaatcaaaattccgatgatcagtccgctgattttcccgatgttatgggtcagtttcagcttcgtaaatgcgccgagaatagaaataaagactagcggcatgacgatcatctgaagcaatttgacataaccgccgccggcgatattaaaccaatcggccgtttgtgtcacgacatgtgaggccggcccgtaaatcaattgcagcgcaaaaccgaatacaatgcctaatccgagtgcggtaaagacacgtttagaaaaggaaacgtgttttttttgcatcacaaacagacctgctataaacaaaaacaaaataaaaacatgtaagattacaaataaattctccaaaacaggtaaacactcccttgctcattatccttaaacactatattacatcaattccgatcggtcaagtaagaattgacaatatatgtatttttattgatttttctcttttctttccatcctttctttagtaacttatataagggtgattgttatgctgaaggaactgtttcttaatttgacgattttaatcacatttaattatctcttcaccgttctttttaaagagtcgctttcacataaagaagaccgtccgatgtttcaattactgaaggggacggtctgcgggcttttaggggtttttctgattgctttcggcttttcttactccgattccatcattgatctcagaaatatccccattatcattgccgctctttacggaggctgggtgtctacagcagctgcctttatcattatcgtggcaggccgtatcctgatcaatttcaatgccagcgccatttattctatcgccgcagtcggcatgattgcgatactttctgtggccgtattcagaggaaaaaagccgaatcacaaaaatgcgttcgttatgctgctcttttcaaatgttattatcaccctgacgctgttgttacttatgcctgaacagcctgccggggccctcgtttatttttggctcatttctaccttgggcggaatgctgtcgctgtatatcattaaacacgaagccgatgcccgccttttgttcaagcaatacaagtttcaagcgaattatgattttctgacggggatttttaataagagaaaattcgaggaagtctcgcgcgttctgtacgatcgggcgtctcaatccccctcgtctcagctcgcgcttatttatttggatattgatcactttaagcagatcaatgaccaatacggccattatgaaggggaccaagtgctgaaggaactgggggcgcgcctgaggttcttactcagcagttctgatccgtcagcccgcatcggcggggaagaatttgccgtgcttatgcccaattgcacgtatacaaaagggcttcacctcgcagaagaaatcaggcacacgattgacgcgaacccgattctgctgacgagcggagatacaattcccgtgaccgtttccctcggcatcgcgcattatccgacaaatacatcggatcctcagacattgcccctgatcgcggaccggatgctgtacaaagcgaaaacatcagggcgcaatcaagtgtgcagcactgaaaaaaaagaatgatcgcccgaagaggaaatcattctttcttttcagtgagaaagccgcccctcaggaaaacaggaatcaggctgccctcatattctttttcaataaacgccgcggtatcatctgattgatacaaagacaggagtttttgcatccgttcatcatctttatcctcagccctgacggcgaccagatgaatatacgcttccttcatttgcgccgatcggatcagcgcgtccttctccgcatgaaatcctgctcttttcgcctcgctttgactgagaactgctgcgtcagcatgttccgccgcctgatatgcgttcttttttgtttccgtttttaaggtcagatgcttcgggttgtccttgatcatatcagttgaacccgtaccggtgaatccctttttcaatgtcatcagtccggcctcctgcatgagaaaaagcgccctgccgaaggccgccgcttcaccaggcacggcaatgaccgctccgtccggtatatcctccagccgtttatgttgcttggaatacacccccagcgatgccgcatatgtcgttcctaaaggagccagcttctttttcacatgaggcggcaaagattgaaaataagaaacggattgaaacgcattggcatcgagatccccgcccgcaagtgccaaatcggcctcggcataatccgaaaacattaccaaagaaagctgcaatccttcctcaccggcttttttcgcgacaaactcccagatcgattgatcagatccattgattccgatagtaattgtccggttcccgtcaggataatggcatgaagtaagtgacatgatcaaaatgaaaagaaacagactgtttataagccgcagattcaagttgacctactccctatctatttttatgtacagaagctgcaccatggtattcgggctcatgattacatacaataccgattaaaaaaagggttgtcaattgcttccttaagaggctgcaaagcgatttttctcagctgaaaatgggctgttctagtctcaaatcagatttccgtatcagagcgttctcctcttaaaacatgttatttcgaaaaaagttacatttagcagttgttttttcttcgaattactggtagagtaaaggtaattatttttgttcgaactatctttaagaagaaagttttgtaagagttttcgtcttggaagtttgttttagagcaagaatagtgaatttaagcgttatgtcgctttaggaggaaatttcatgttagaaggtaaagtaaaatggttcaactctgaaaaaggattcggattcatcgaagtagaaggtcaagacgatgtattcgttcacttctctgctattcaaggcgaaggcttcaaaactttagaagaaggccaatctgtttctttcgaaatcgttgaaggaaaccgcggaccacaagctgctaacgtaacaaaagcataaattgtttaaaaaccctgccggtgtacgccggcagggtttttttcatctaaaacgaaaagctgttttgcaaaggcaaaacagcttttttatatcaggtggcaatatcgcgttttaagaagacgccgaatgcgagcgccagaaaaataacgaagtaaatcacaagcatcacaaccgaaaatgtcatcgtcatcccctctactaaaggagtcccgttcatatattgcgacaaatccgtattggcgaataaaatatatttggtccattcaaatttcgtagcaagaaatacagtcgccgtgtttcccataaccaatagaaaaatagaaaatccgaccgctaatgagctgttccggaataccgcagacagcataaacgccatcgtcgcaagcataaaagcggagacagattcatagatatatgttttagcgaggaaggcgatgatattttgctcaaaaacatggccgtctttgtatacgagatgaacatcagccgcagtatctccccctgtaccgaaaaagaccaatcccaacagagcggagccggcaaataaaatcacaagcatcagcagtccgaacagcagcaccgtcatatatttagatagcaaaatctgaaaacggctgagcggacggatagcaagcagcttgatcgtgccccagttgaactcattcgccacaatgcctgcggcaatgataatcgtaaacagcccggtcaaaacagtcatcatcgaagaatcagctacgtatgaccacactgtataccctttatcctcagggatgttatgatccatacggtattgatttatcgcgacattctgtttcaggttatcaatgagagtctgatttccggtttccttcatctgctgtttcatttctttgttttcggcctggagctcctgtttccaattcggattggcttcgctcgaggtgaaatggtttgacagaagcgcaaaaccgatcatcgaaacgcctaaaattacaatcatagcccatgtgccgacgcggctgaaaatttttatccattcattatagatcagcttaaacatattgaacctcctctttcgtcccgccggtaatctccaagaaacggtcttccaaagattttgtcatgattttcacttcatataagcggatgttttcacggacgagcagtgaaatcacatcaggtacttcctgttttgacagcctgatctcaatgccgtttgtcttcttcacacagtcaaactgactcagaacggcaagagcctcttctctttgttcaagatggaagaagtatgtatctttatcctcttttccttcatcccttactttttgaatatcgacaagctcccctttttgcagaatgccgattcggtcgcacattaactccatttctgacagcagatggcttgagacgatgacagccattcctttttcacgtgtcagctttttcagatggtccctgatttccctgatgcccgcgggatcaaggccgtttgtcggttcatccagaatcagcaccttaggattatgcagcaggctttgggcgaggccgagacgctgtctcattccgagagagtaggtttttactttgtcatgtattctgtcctgcaacccgacgagctcgatgacctcatctattttttctttcgtaacgccttttaccatccttgcgtactgctgtaaatttttataaccgctcaggaatttgtacagctccgggttttccacgatggctccgacgtgcctgaccgcttttgcatagtttttcgtaatggattccccgcagattacgatgtctccctgagacagtttcattaatccgaccatcattctgatcgtagtggttttccccgctccgttcggccctagaaacccaaacacttcgcccgcccggacggagaagctcagatcatgaataatcgttcgtccttttatcgttttctttacctgttgcagttctaataccgtttccaattagaatcccccttctatttcgtgcgcctgcatggcgcttctgtaccattgcagcacggacattccttcctgttcccgaatttcttcgacctcgcgccgttcagcgattttcccttttatgaaaaccatcacttcgtctaacagcgtctcaatctcgccgatctcatgcgtggcgatgacgacaatctggctgtcaaaatcaatataagatacgagactgttgacaatcgattctctgaccgccggatcaagacctgaaaacggctcatccagcagaatgacggatgcttttctcgacagggtcaaaacgattttcagcctgccccggctgcctttggacagctcttttatcttctgcttcgctgaaagattcatttccgttaataggttatgtgctttttccagctgaaaatccgggaattgcgaatgataaaatgtgagcatatcaccgacggtcgtccgggcgaaaaacatatcatgttcggttaaataagccgtacgaaacagcatgttcctgcttactgcgcagtctccgatccggacggcgcccgaggtcgggaacgcaagcccggcaagcattttaagcgttgttgatttaccgcttccgttcggccctaaaattccgtagattttacccggagacaatgaaaatgatacatcgctgaccgcgagcctgcggccgtatttttttgttacgccttcaaaatcaagattcatcgtttccttcctccgcatattgtttgatcccgtcgatcatttcctcaggagataaccccagctccgccatttcctgaataaagcgtttgaaaacgtctttagtcagcctgtctttcagctccgctttcagatcggacctttccgctataaaggttccctgtcctcttctcgtctccacgatccccagcctttccatttcactgtacgttctttgtatcgtattcggattcactttcatctgtacggccatctcccttacggacggcagtttgtcccccggtgaaagctcacttcggatcagccggtaatatacacgatcggcaatctgcagataaatcggcttggatgactgaaattcattctccatcatcacacctcaacctttcgattcagcagcatagaggccagcgcgagacagagcgccgcaagcacgatcactgccaggaagctgaaaagcgagatgtggacggccttcagctccaccgtccagccggtcaattttgtataatgaaaatcaaaatccgcatacacttttaccggccataaatcatgttgagatgaagtgaatggcgtaatgattttatcgtcaatataggtccagacaaacgcaagcacgatgcagatcacccaccggaggacgggaacatgttttaatgagtgaaaaacagtccaaaagacggccacgatcacagataaatacgctgaactgatcagcaggtaagcattcagtccggttaatgtgccggccaggggaatggtgtgttccagcgctccttttgcagaaagcatccggtacatccaaatgccgtaaccggtcagcgccagctgcccgatcaactgatacagcagtgaggccgtcagcttggaagccagcagataaaatcctccattcggattgtaaagccacagctgattttttccttctttatgaaggtgatagtacataaaaagcggcgctacaagaaattgaaaaaaccccattgccgtaaaaaagccgaaaatgacgagcggttctttctgacgggcagcgatgacgtgggctgcaaacgcccagcaaatcatgccgcaaagccacaccgcaagccaaatccatgaaactttcgcatcttttttcagcaaacctaaaaacgatgtcattctttctctctccattcggatcaagtgtatgagtaacatagtacactagatcatcatgtattacaatatcttcaataaaaaaaagacaaatccgctcttacgcagatttgccttttcaattacttctttttgttttttaaggagagcagcgcatcacgatagctgctatcctgcattttgccgccgctatcaggatcgtttggttcctgatccgtctcagaagtcttaaacttctgaagcgcctgacggtacacatcatcgcccattgtattctttttctcacggggagattcagattttacaacgacgggagcatgctcggctgagcgctcctcggccggatcatgcttttccggctgttcggctgtagtgccgatcgcttctctcttttcttctttgacatcctgtcctgcagaagtgctgcggacattgaatgtgataagaagtgcaatcacaatgacagcagcaataaccgctataataatggccatataaccctctccttactgtcgtccggcagttagattacctgtgacttggctgacacgtctgccaagcgcacggcctaattgaaggccttcttccgtcatcagcacatcgctgtcaaccgggcatgtgacgcccgcaccgtagtaagagccgtacagcgcgttttcaggaacgttgccgggaagtccgacaacaatcatgccttggtgaaacataggagtgatcagattgtgcattgtcatttctaatccgccatgtgttgtcgccgtcgtacagaatacggcgccgactttatcaatcagctcgccttcagcccacagatagccgagtctgtcgatccacgcttttaagcctgaactgatggtgccaaagtgtcccgggcatccccagataatggcatccatgtctttcagcttgcggatgtctgcttgatcgacatgatcgatcaggacttcagcctcagcgttttctcgtgctccttcggcaatggcttcagcaaggtgttttgtatgttcgccttcactatcgtacactacgtaaattttcattcaggaaacctcccattcagatgattaagattccttcacttctttaggggccggaagcaatgacagctcctcttttttcttcgcccgctgtttgtctttccgtacgtcacgcaagaacaggctcaggactacgccgataaccgcaaagatcgtcgcccacataaacgcgtcattaatccccataacgttggaattaagtgaagctgttttgtagagataagaataaacggtttgtttcgccgcatcaagcgacatgttcatgttgaccattaaattcgaaaccgcgctttggaacgattgcatgaagcttggatcagccgtgctcgttttatccgcaatctgcgaatagtgcattgtcgtacggttcgtataaatcgttgtgatcaaacttgttccgattgaaccgctgatctggcggagcgtgttgctcatcgccgtgccgtggctgttcaaccgtgccggaagctggttcattccggctgtcataacaggcatcattaacagtgacataccgaatgcgcggatggcatagacaagcataatgtgcgtgtaaggtgtgtcaattgtcaattttgtgtactggaatgtcgttgcgaccgtgatgaccagcccgataatcgcaagcggtcttggaccgattttgtcaaacagaataccggaaatcggcgacatgatcagcatgacaatcgcgcccggcaatagcaagaggcccgattgcagcgccgtaaagccgactaagttctgcaggtaaattggaagcaggaacattcctgtgtaaagcgcaacggtaataatgatgttaatcacactggaaagtgagaaaatatcatatttaaatacccggaagtcgagcatcggtttttcagagcgcaattgctgaatgacaaacgcggcaatcgcgatgacaccgacaatgacggtagacagcacgatcggatctccccagccgtcgctgcccgcttcactgactccgtaaagcaatgaggcaaatccgacaatggatagaatcgcacccaagctgtcgagtttgattttttgcggttccaccaagttcttaaagaggaagaacgctatgataataacgattgccccgatcggaacaagaccgtagaacataatgcgccatgtgtaatgctcgatgatccagccggaaagagtcggtccgaccgccggagcaaacatcatcgcaagaccgaaaatccccattcctttccccctgctttcaggcgggaagataagcagaatggttgtcatgaccagcggctgcaggataccgccgccgaccgcctgaattaaccggccgatcagcatggttgagaagttaggcgcgattccgcagactaacgttcccgctgtaaaacagaacatggctacgagaaagaggctcctctgtccgaaccgggtaattaagaacgcagataacggaatcaaaacaccattgaccagcatgtatccggtcgtaagccactgaatcgtcgtcgcactcacaccgaactcggtcattaagtgcggcatcgccacgttaagaagcgtttggttcaagatcgccaggaataacccggccataagcacaataagcaatgttttaggactttttacttgattatctgatttagccacctaagacaacctcccttcatggtttgatgactgatctgtattattcagagatttttacagatgcgttcataccaggaagcaccttgtcagatgggttgctgagtgaaattttaacaggaactttttgcgttacttttgtgtagttgccgcttgagtttgaagaaggcagcatatcaaatgttgaatttgtcgcataaccgatttcttctactgttccgtcaaatgttgtattagggtcgccgtcaacaattacgtctactttgtttcctacttcaatgtctctaatgtctgtttctttaatgtttgcagtgatgtaaaggtgtttcatgtcaatttcctgggcaattgtcgtaccggcttgcaccatttggccgtttttcacttcgtttttcacgattgttccatccatgatggcttttacgtcagcattttgctgtcctttgatttttgcaacaacgtcgtttttgcttacttctttcccctcatcaaggttccagtcagttactttacccgcagcaggagctgtgatagcagccatgtcgccggcaacttttgcttcatcggtttttacatagtgtgtgctttgataatagtagtaagcacctccgcctataattgcaagaacaacaatcaaaccgataatgttggtcagaattaaacgtcctctgttcattttgttttctcctttcgtttcttcctctatcattttgtggaatgatgataaaaatatgtggggatttttttattttccgtttttcactgcacagccgtttgcaagcttcgttaaactttccgcaagcttgcgcaggtactgcagttcagcggtattgagctgccggtataagaccgccgctttttcggcatattgaacagcagctttctttagaagttcttccccctcttcggttaactgaatcataacaacacgccggtcgtcgtgatagtcgctccgaaccattaggcggcgcttatacagaatatcggtcattctcgtgacagacgccggtttcagatcaagcgacaaagccagccttgaaagctgcgtgcttttgctcttatgtattttgaacatcagcagatactgcagcactgtaatatcaaaaggttcaagaactgtctccagaatcattttctgctttttgtaaatcgatctggaagtatcaaacagttgttcaaaactgagcaaagcgagctctgattcaatcaccgtattttcacctcattcccttaataatagttcacaagataaaatattaataaatgaaagaaggtttgtaaagagaaaagtttcattttttaaggattttttttatgccgttttttctctttatttttaatttaaaaaagccgggtgaagaaccgcggccgcacgattcttcactcggctttatatttcatacgatgctttgcttacaccggcttcctcatttttaaaaaagcttttcagcgcttgaaatacgtctgatttctgtttcaggatgtagtatttaaatttatcatctttgacatttttataggcggacatgagggtggaatgcctgttatattgattgacctcaccgtaacagaacagattcgattttttcatgatgtcattgacgagctttacgcaccgggcgttatccgaagtcaggttatctccgtctgaaaaatgaaagggatagatattgtagcgggcggggtcatatttttcatcaattaattcaagagacttccggtaaacggaggaacagatggtgcccccgctctcccctttcgagaaaaaatcttcttccgacacgaccttcgcttccgtatggtgggcgataaattcgatatcaaccgtttcatactttgtccgtaaaaatcgtgtcatccaaaaaaagaagctcctcgccatatacttttcccatacgcccatcgaaccgcttgtatccatcatcgctaaaacgacagctttcgattccggcttcgtcacatcattccatgttttgtatttcagatcttccggataaatagggtaaaacgacggcttgcctgtcatggcgtttcgtttataggccgacagcatcgtccttttcttatcgatattccctgtcagcccggttttccggatatcattgaactcgatatcggtatggacgatattgtccctttccttttgctgcagattcggcagttctaattcctgaaacagcgcttcttccagatccattaatgaaacttccgcttcataataatcctcgcctgcctgatcgccggctccctggccttttccagccccttgctttttatctgcgccgtctcttgcgacgacatcgccgacttcgctgtcgccgtcgccttggccgacatgtttatttttatcatagttataacggattttatattcatcaagcgaacgaatcgggattttcacgacatcttttccgttggacataataatgctttcctcagtgacaagatccggaaggttgttttttatcgcttcctgtactttcttttggtggcgctgctggtcgtcaaagcctttgcgatggagggaccagtcttcctctgaaatcaaaaaatttccgctgtcattacgggacatgaattcccctccttaaccgttatggtcgttttacatgtgtattccggcttggtcctgtttatgaaacaagtccggcgaaaagatttatttttatcttatgccggccggactctccaattgacaaacaattgcgaaaaacagacaaaagaacccgtccttttacagacgggcctctcaatgaaatcaaacatcagcggtttaacaagcttccgacatatttcagcagttcattagcgcttgtcgaattatagccgtgttcatctattaaccttgccactacctcattgacctttttaagctgctgttcatccggcgttttggtggaggtcgtaattttcactacatcttttaagtctgcgaacagctttttctgaatcgcttcgcggagcctttcgtgcgaattatagtcaaagcgttttccttttcttgcataggcggatatgcggattaaaatttcttcgcggaacgcttttttcgcgttttctgaaatgccgatctgctcttcaatggatctcatcagtttttcgtcaggattcatttcttcacccgtcagcggatcgcggagcttatttttattgcagtacgcttccacattatctaaataattgtccatgagagttttcgcggattcttcatatgaatagacgaacgccttctgcacttcttttttagcgatgtcatcgtactctttcctggcggcggaaataaaattcatataccgctctttgtcctcggcggagatggacggatgctggtcaagtccttcttttaaggaacgcagcacgtcaagcgaattgatcgattccatattttttctgataattgttgaggaaatgcggttgatgacatagcgcgggtcaattccgctcattccttcatcatggaattccttcttcatatcctcaagatcaacggaattgtaaccttcaacgctttctccgtcatagagcctcatttttttgacgagatcaatatcagagcggttcggttccttcagccgggtcaaaatagaaaacatcgcggccacttttaatgtatggggggcgatgtgtacgtcagaaacatcactttcagaaatcattttttcataaatccgttcttcctctgacacctttaaattataaggaacaggcatcacgatgatcctggagtgaagggcttcatttttcttattggcaataaacgagcggtactccgtttcgttcgtatgcgcaacaaccaattcgtcggctgagatgagcgcaaaccgtccggctttgaaattcccttcctgcgtgagtgacagaaggtgccacagaaatttttcatcgcatttcagcatttcctgaaactccatcattccgcggttcgctttatttaattcaccgtcaaaccgataagcgcgcggatctgattctgatccgtattcggcaattgttgaaaaatcaatactccccgtcaagtcggcgatatcctgtgatttcgggtcagacgggctgaaggttccgattccggtacgtttatcctccgagaagaatatacgttcaacctttacatcctcaattctgccgccgtattcttcttcaagccgcatgacattaagcggagaaaggctgccctcaattctgatgccgtattctctgtagaagtcgtcgcgcagatgatggggaatgagatggagaggatcttcatgcatcgggcagcctttaatggcgtaaacagcgccgttgtctgtcaatgagtaggcttcaagcccttttttcagcatggtgacaagagttgactttccgccgctgacgggtcccatcaatagtaaaatccgttttcttacatcgagccgcttggcagccgggtgaaagtattcctccacgagccgttccagagattcctcaaggccgaacagctcccgcgagaaaaagctgtatgtctttttaccgtcatcctcctcgattccgctgtcttttatcatattaaaaacgcgagaatgagcagactgcgcgaccaatggattttcttttatgatctccaaataatcagcgaacgtcccttcccatttgagacgctgctcttcctctctgtacttttcaattttctttaatatatccataagaacctcctctatcatggttaatgcactagaaataaggtactttgttacaatctatgcggtgacgtgataatacatgcttttcgtttcttaaaaataaagacgttacaaggccgtcattgacaagggtccggtgcaccgttcataatgaaagaaatacagtttcatccagactcggacatcaaatggaaaagcaaagaggaggagaaatgatgaaaacgatcattttacttggggtcattctcacttttttagtatccatttttacggcgggttacgacagcaaacctgaaaacaaataacggcaaaagggtgctctttatgaagagcaccctttcctatacaacataacaatgtttcatatttggatatgttcttggacagttgatttttcatgagatttgcagcttgtttgatactcgattttttcgattttgcaacccgggccgatttccacatgtttccctctgacgatgtccgcttccgtgtattcgagataaattgcgtctccttcgatcaattcagcagaaagcgtgccggctttccgtttaagaaaaccgggtttccgtctgacggtgatcgatgtgccgccgatttctttcacgcggcttcggtcataacgcaaatggatgtttacgtcccccgcgtttaacaatcccgccacattgatacatcctgttacatgaagcagctccgtctcgcaatcgccgccgacggtgagactgccttttatatgacactgctctcccgcggccccgccgccaatttcagcaagtcctttcagcctcatcgtggcgaaacgcacggagccgccgactttcaatgtgccgatcacatttgctgaacgtgctgataaatctcctgcaacttcatgctctccgaaaattttcagcctgttgatctcggcatctccgagaaaaagtcccgtaccgaatatccggcagcgttcgctttgaagtccttcgccgacagttccttcccctttaatgcttacattttggtaggaaccgccggaggcgtgtccggctccgtacatttttaaatgactcaatttttttgtcgtttccatcgcagctcctcctatcgtttcacgactttgttaaccaaagcggaaggatcacatgtaaaatcgccgctgtattccacagtcccaatggtgcagcctgcgccgatctgtacatgatttccgcggactgtcttcgcgttcgtgtccgccaattcaatgatgtcaccttcaatcagctctgctgtcagcaccggggccggcatcagcttaaaacgcgtaagcacgctctttctgctcatcactttcaaatggcggcatccaatttctttcactcggctctctcccgccgtcagcttaatactgacttcatcggcattcagcaggccgccgatcttgcatttgccttccgaacggaacgtctctgtctcgcaatcgccttcaatcccggctttcccggatatgaaaatatcatcagctttcacaccgccgccgaaagatgaaaatcccgcgacgttcagccgctccgttttgacatcacctttaatgacacccgttccgttgatacggatggattcagcttcggcactgctggaaattttccccgaaccgctgatcgtcagcgtttgcgtcttgacatgtccgtctgtttttccgctgccgttaaacaaaaagctcgcgcactccacatcacctgacaccgtgccgcttccgttgatctccactgtatgaaaacggcctccttttgaacttcctgaaccgttgatgattaatttatctgttacttccattgatggtcctcctgcatccatttcgtttttaattcttccgatgccgcagcaagcgccacccgttcaaccactttgacagtcggttcaaataaaatatgttccgcgtctgcgatgaagcacgtcgttacgccaagctttcggagcatgacaagctccgtatttgctttcagttcggaagcctcatacgttttcagcacccctgccgccaattttccttcctcaaggctgatattgcccgatcgcaaaagtccttcaagcacatataaagacagcagcgcgcgggacgtgaatgtcacgccgtcttcgccataaacttgcagcgcggcttttgaaatcagtcccttttgaagcagctccgcagacgttatattgacatcagtcatttgcggagacagcatttctctcatttcatccaaagacagattttctttcattttctgtatttttgagatgcgttttaatatttccgctctcggaaaaaatgtttcctggcctgtaaatgttgattttcggataaaccattcttcaggaattaaatttttccgtttccagcggtacagctgcccatatgaaattgatgtttcttccagcaattcttttttagaaatcagttgttcctccatgaatccagctccttcgatgaaagtattgtaacataacactgttacgttgttaagcctggaaatataaaaacgccgtgaaccgctgctgtccgtcttttttattcaataaaaaaacgcccggatgcgggcgtttttttcacgtcaaatctctgtaattttgctggcgcagcgcttcatatacaagaatcgcggccgtgttggacaggtttaatgatctcacatgctcggtcatcggcagacgcaggcagcggtccatattgttttcgatcaattctttcggaagtccgctcgtttctctgccgaatacgaagaaaaagtcttcctccgtatttgagtaatcaaatgatgtgtgcggcttttggccgaattttgtaatgaagaaaaactttccgttctcatatgcctcaaataactcttccaatgaatcatgatatacgacgttgacgaactcccaataatcgagtccggcgcgcttcagcattttatcatcggtcgagaatccgagcgggcggatcaaatgaagcgttgtgtctgttgccgcacaagtacgtgcgatatttcccgtattggccgggatttcgggttgatataaaacgacatgtaatgccacgatgttcacctctgttttttattccgcccaccattatatcattaattactcttttgtcgtatcatccgtaatatgaaaaaacgcatatctgatggaaggagtatacgccgttgaatcctcatatgaccaatatctcattctgctgtcatacgtttgggcattgacaagcggcatattgcttttatctttcgcgaccacgatcgccgtatgattaaaacggccgtccccttcaaaatcatagcaaataatatctccgggcatcagttcttcagctcttgatacttgcaccgcgcgaagccctgccttggattgggccagatacatcttcatcgaatgcgcgaccgtccagctgtagctccacgagcttgccttcatccaccagcctgagcctctgttcggatgcccccgcatcggtgcttttccggcatgtaaacattgggaaataaaattggtgcagttgtcgctgaaatttttataagcgggatttcgtttattccaaaacttctccgcatactgcacggcagccagacggtcatattgaaacgcccgcccgaaatcttcccgttcactccgctcatattcaattacactgtttccgtcagaaaatcccgccggttttttctttacttcccggtctttaatcaaaagccgatcatagagaaatgcagtccgttcctcaatctgctcttctaagtaaaggtgtccgtcatgctccttgcacaaatattcgaaatgaatcgtgtacatgacgcataacgtgccgtcgtcctcaaggctgcttttgacaatgacggcttttgccttcgctttcacgatgtcaactttccgtttttcaaacagctctttttttctcgtcaggacctcaagatcgccgggctgcccattgtgcctcatctcggttccgttgattaaataatgaagccgggcctccgctaaatcttcaataatatgcttcaagcgctccacccaccatactgttttataaagaaaaacacttgaactcacgccaagtgctttttctctatacatatgtcaggaccggccggttttagtcttatcagaaaccgataacagctccagtcccttttcaatttcccgtatagcttcctcatcctgctccttttgaagcgctttttctaattcccccgcataatcaggatcaccgattttcccgatggcccaggcggccgtccccctgataacggggcgtggatcttggtgcatcaaggccgttaattccggaagagacgaggcatctttaaaatgagccaaagctaaaatcgcattccgctgtatcggcttcttgccgcgccatgatcccgatacatgtccgaatttttctttgaattcgcggttgcttatggtcaaaagcggctttaacagcggctttgcgatttccggatcaggctccatctgcggatgaagatgaaaatctttccccttattaatcggacagaccgtctggcacgtgtcacagccatacagacggtttccgattttcgtgcggaactcatccggcaaaaatccctttgtctgggtcaggaacgaaatacagcgctgggcgttaagctgtccgggattgacgagcgcgccggtcggacacgcgtctaaacattttgtgcacgtaccgcacatatcttcaatcggcacatccggttcaaagggcagattggtgatcatttcagccagatagacgtaagagccgtattcaggcgtggtgatcatgcagtttttggcgctgaagccgattcccgcccgttcagccacggccctgtcggacaattcccctgtatccaccattgactttgtgcggatatcctcatgtttgctttggagaaaattctccagcagatcaagcttttccctcagcacgtcatgataatccttcccccaggaagctctgcaaaaaatgccgcgccgcccgtccctcgtgctcctcggcgcatctttcattttggaaggatacgcaagggcgatggcgacgattgatttggctttcgggagaagcaaagacggagtaacccgtttttcaatatccggctcttcaaaaccggataaatagccgagtgattcctgaagaatcagccggtcccgtagactgtcgaacgtatcagccgtcgtaaacccgattttgtcgactccgatgcttttggcgtattcgattaattcctctttcagtttatgaatattcattttttgcacagcctcctttctttgtgatcaggctcccgcacaggtataatagagttttatcatcccgaaatggagtgaacacacttgaacatcagtttagatccacttattgctgaacgggtgccggggatcaaagcggcagccgtcttatatgaacagatcgaagtcgggcctgctccgcaaatgctgaaaggccgcctccgtttatttcaagaatctctttactttgattatgctgacgggggtatagaagagcagccttttgtaaaagagtgggcgcgtataatggaacagctcagtcccgccttttcaggacaaaaaacgccgatggagcttatgctcggcgatatttcccgggaacgattcattgaaagtgtgaattcagcccatgataccatactttttttctccttgaaatattcattgcctatcatggcgtatgatgccgcagaaatagatcaaccaatttcaattacgatcggagaaaaagaaagcgtactgtctttctccggcccggacggcgttttcggcgacttcaccggacatatcaatacacgccctgtcacgcccggcacaaagaaaatgctgcagctgatctttttcccgccttcatttcatgccgacgcggcggatgagctgctatcatccttaacaaaaatgtttgaacaaattcacggaggcacgcataccgtctcttggctttcataaaaagacacgccttcgtgtcttttttcacataaaaaaacgcaatacttcgtttatcagagaaacgaaacactgcgttaataacgtatgtatggagcgggtgatgagaatcgaactcacgacatcagcttggaaggctgaggttttaccactaaactacacccgcattaaaattattttttgtcagtaccgatttgatgtttctaatattacatgtttatttttttttcgtcaagggaatgttaaaaaatttgtcgaaaaaagttctttttttgtccacatgttaagttgggtttacattttgttaagagtctcatacaatataaaaaagaagaaaacttgaggtacgcctgatgatgaaaaataaagtaaaagagctgagagccagattcggctattctcaggaaacgctcggaaaagaagccggagccaccagacagacgattgcagcgattgaaaaaggagattatgtgccttcacttttattggcgcttaacatctgccgggctttctccctgccgatggaggaagtgttctggctggaggaggagaaaaaatgagtttgaaaagaaaagcgtgttttcaccttgcactctacggattggcctgctggacgcttatttcctttatggaagcggcgccgcggatcgctcagtttttccaaacggaggggagcggttcatttgagctgaatatcactccgtttctgctgtttaccgtttgtgccgcattgtatatctatgccgaaaagaaaaaacgaaacggcaaaaagcacaggcttgtacccgatgaatttgaggaacaggatgaaagagaacgaatgatgacggctaaagcttgccgttcctcgtatatcgccgtttacttctcattgccggccgcagccgttctgcttttgttttatccgctgattcagccgcatcttcccttttttccgattcttttgattttcattctgatgatgattcagcatttggcttatgctttcacttttcataagcacggcaaaaactccggttcatgacagatccggagttttttacattaccagctcgcttttttcaccccgggaatccggcctttatgggccagctccctgaatgcgattctggacagtttaaattttctcatatatccgcggggccgccccgtcaccgtacagcggttatgaagcctgcccggagcagaatcacgcggcagtttgctcagcgcttcccagtctccttttgcctttaattctcttcggatgtccgcatattgttcaacaagcttctgccgcttgagctctttgatcacttttgatttttttgccatttcagcactcctaacaaatcgtaataattacgttttgtatcatatcatccatattagcatcgtgcaagctaagcgcttaaaaaggcgggtgaatacccgccttcactgccggcatttccccggaaatgaatccgcagaaagcgcccgccgtcaattatccgccttgcgacgtcatcagactttcgctttatttcctcttgcaaaatggtcgttgcccattgcttcacccagtctgcgctcaagctttttagtccgttcattctgaaacggcagaagcggaaacacgagttcagacagataataagcttcttccagatgcgggtagcctgaaaagataaacgactcaatgccgagtgcctgatactctaaaattcgagcagcgacagtctgcggatcaccgacaagtgccgtgcccgctccgcctctgaccagtccgatgccggcccagagattcgggctgatctcaagcttcgagcggtcaccgttatggagatcggccatccgtttttgtcccgatgaatcagcgcgccgaagcgcagcctgcgctttcgcaatcgtctcttcgtctaagtggctgattaatcgatcagccgcttcccatgcctcttcctcagtctcccggacaatcacgtgaagtctgatgccaaaacgcatcgtccttccttccttggcagcctgttttttaacggtttcaatcttttcttttacctgctccggcggctctccccatgttaaatagacatctgtatgtttcgccgcagcttcaattcccgcctgtgatgaaccgccgaaatataatggcggatgcggagactgctttggcggaaacagcagattgctgttttccactttgatatggtccccttcatatgtcaccgtttcgccccgcatgagtccgcgccagacggttaaaaattcttcagtcgccttataacgttcatcgtggctgataaacatgccgtctcccgccagttcataaggatctccgcccgctacgacatttacgagcaaacggccgtctgacagccgatccattgtcgacgccattctcgcggcgacagacggctgcatcagtcccggacggaccgccactaaaaatttcaagtcactcgtttcccccgctaaagcggcagccgtcagccacgggtcttcacatgatctccccgtcggcagcagaacccccgtatacccgagtctgtccgccgcctgtgccacttgcttaaaataaagatgatccgccgttctccctcccgtttgcgtccctaaataccggccgtcaccatgggtcggaataaaccaaagaatctccatatgaatctctccttttttaataggttacccttcataactgttccgccattttaatagtttccgttcgagcattctgaccaatgcatctgtcagcttgccgacagccgcaaaaatgataatgccggcaaacaccttatttgtctgtgaaaattgtctggcatccataatcatataaccgacgccctcgctcgatcccatcagttccgccaccacgagaccgagccacgcaatgcctagagagagcctgatgccgagcaggatattcggcagagatgccggaagaattaatttcgtcatctgctgataccagttaaattccagcacccgtgcgacgtcaaacagcttcgcgtccacactgcggattccgagaaacgtattaatgtacacggggaaaaatgcacctaatgcgatcagcagaatttttgatgtctcatcaaacccgaaccacaaaataaacagaggagtcacggccaagtgcggaaccgttctgagcatttgcagagacggatctagatatgcttccgtccgctttgagaaaccgaccagcagcccgaaaacaagtccgaggcccgcgccaagcagaaatccggcagcagccctgtataaactgatctctaaatgaccccaaagttcacctgaaagaagaagttcctgaaacgtctgcaagatgacgacaggtgaggggagcaccgtggccgagacgatgcccagacttgcgataaactgccatactgcgatgaccgcagccgggagtacaatccctttcatccattggtatgaatacttccgggatcttgccagagctttcttttctgattggcttattgcgccggcagccgttgatgcttctgctttcattacttgccatcccccgtttcaagcgcttttttaataaatgaattgtcgacaacgtcttttacatgaattttcttatgaatcgcttttgtttgatattgaaaatcagcggtttcctgctgggctttgacaatatcatcattgatcggttcattgagaggctcagtattgttaagcacgtttctgacgactttcggatcaagatgtttgattttcgcatataaggagacagcttcatctttgtgttccttttgccatgcaactgctttattgaacactttcagaaaacggaccacctcatccgggtgttctttggaaaatcccgttctgactaacgtgaaaccgggagaatataaatctgtgctttctccgttcgccaatatttccgccccgtgctgcagcgtttcaattgacaaatacggctcccaaatggaccatgcgtcaactgatttgttttcaaaagcggaaaccgcctcatcaggctgaagctggatgatggtgacgtcatcggcggaaagccccgctttatctaaagctttatagagaaaatcaaagccgctgctgcctttggctacagcgatttttttacctttcaattctttcaggctctgaatcccgctgcccttgtttacgagaatgccgtttgcctttaacccgtcctgagacagcccgatctctttaaaatcaatccctgccgcctgaccggaaatgaccggtgaattgccgacctgggaaaaatcaagcttatcggcggcaagaccttcaaactgcggaggaccgctttggaattcgacccattttacttttattccgtcttttttgaaggcctcttcaaaccagcctttttccttggcaatgagaagcgggcttaaactctgctggatgccgatccggatttctttcaccgttttcccgctccctcctgtcctgtctgcactgcatccggctgacatcatgactgctgcggctaaaagaatgatgatttttttcacttcgcttcgtcccttctatattccggacccatccgcaaaccggaggtcttccgttttctcaaattcagaaagcaccttctgccggacggcctgaaaatccgctgacgtccgattgcgcggattcggaagctgaatcggcatcaggctgtgcagccggccgggctttgccctgaggatcgccagcttatcgcctaaatagacggattcatcaatatcatgcgtgaccagaatcatcgtcgtttttttctcgcgccatatatcaagcagcacatcctgcaaatgttttctcgtaaaagcgtcaagcgccccgaacggttcatctaaaagcagcacctccggctcacgcaaaagggctctggcgatggcaacccgctgcgacatgccgccggataattcgcgcggataagcgttctccgctccctgcagcctgacaacctcaatcagatcatccacttttttccgaacggccgggtcgttcatattgagatcggcagcgatgttttgttttaccgtcagccagggaaacagccggtgctcctgaaagataaatccctgccggatgcccggtcccgatacattgcggccgtttattgtgacagagcctttataatcggtatcaagaccggcaatcaattttaaaagcgtgcttttgccgcatccgctcggcccgatgacagtcaaaaattctcccgatgcaattgacagctcaatatcattcagcaccggcgttttccggccttcatgctcaaaagctttttcttgtatgctgatggttacagccatctgtcttcccctctctttctgccgcgtgcgatcgaaaaacaaaaaggcccccatctccgattgcttgcagagatgggagccttcggcggtccgatcggcaacccgtttgtttttaaatttgaatatcatgttaattcaaattattccgacttgtcaactgttttttataaggattaaaatacgccctccggcataaccctgccagagagcgcatcggctgtatcacgtatttacttccttttcttggcgggcgattttcaataatgtccgcgcgttgttgccgaaaatgttctctatatcttcttcccgcatattgatttcccggcaggtcctcacctgctcctgaagatatctgtatacatatcctctcggaaatccgttcgaatccgtcccgaagatgatccgttcagcaccgattaattcagatgtcttccgaaacagaatttccaaatcaagcgggtacggcatccacctcatccactgatttgagccggacgtgtcaatatacacattcggacagctccagcacagctgcagcagttcctgataatatccggcgccgaaatgcggaatgatgaacgggatatcagcatactctctcgcgacgcgatagatggagagcgggttgatgttgcgatggctgacaatgccccccgctcttcctaaaagcccgaagtgaattaatacaggcagccttttgtcagccagatacgtccacagctttttcagcgacggatcatgaaaatcgatgtctgtcagcggcccgaacagtttatatcctttcagaccgagctcttctaccgctcttttcagctcttcatacgcatcctcccgctccaaaggatgatatgcaaatccggtaaatctcgcgggattggcttgaataaacgccgccatccggtcattgctctctgctgttaaaaaattcagcacgtcaatgccgtacttatctaattcattctcccatcttgtcatcaaagcgatttcgccgtcatcgccctcaacatcatgcggatcaggaaaatcccaagtcagattcattctatctgaccgctcccggttataatcggaaaatgtcttatcgtttttgccgaaataaaggctgtacggcagatgaccgtgaatatcgacaggtttaaaatgctgccggaaaagcatacaatcgccgcctcccttaccgcctgacaataaaaaaaggcccttatccagtgaagaataagagcctcttgtgtccaagtcggcggtttctattttttctcatcttaaacccattattcccgtcagtcaagtaggctttcaaatccaaaccctttcttcgataataaaaataattattttataatcattataaaataatattgactttttactgataggtgatattatgtttttataaatctaaagaggtgatcacatgagttcaaataaattgacaaccagctggggcgctcctgtcggagataaccaaaactcaatgacggccggcgatcgcggtcctgctttaatacaagacgtccatctgcttgagaaattggcgcactttaacagagaacgcgttcccgagcgtgtcgttcacgcaaaaggcgcgggcgcacacggttattttgaagtcacaaatgacgttacaaaatatacgaaagccgcatttctgtcagaagtcggtaaacgcacgccgctcttcatccgtttctcaaccgttgcgggcgaactgggctctagtgacacagtgcgcgacccgcgcggatttgccgttaagttttatacagaagaaggaaactacgacatcgtcggaaacaatacacccgtgttcttcatccgcgatgccatcaagttccctgactttatccatacacaaaaaagagatccgagaacacatctgaaaaacccgacggccgtttgggatttctggtctctgtcaccggaatccctgcaccaggtaaccattctgatgtcagaccggggcattccggcgactcttcgccatatgcacggattcggaagccatacatttaaatggacaaatgataaaggcgaaggcgtctggatcaaatatcactttaaaacagagcaaggcgtgaaaaaccttgatgttaatacagccgcaaaaatcgcgggcgaaaatcccgattaccatacggaagatttgttcaatgcgattgaaaacggcgatttccccgcatggaaattatatgttcaaatcatgccgttagaagacgcaaacacatatcgctttgatccgtttgacgtcacaaaagtatggtctcaaaaagactatccgctcattgaagtcggccgcatggttctgaaccgcaatccggaaaattactttgcggaagtagaacaggcgacgttctctcccggcacattagtccccggcgtcgacgtctcacctgacaaaatgcttcaaggccggttgttcgcataccatgacgcgcatcgctaccgtgtcggcgcgaaccatcaggcgctgccgatcaaccgttcccgcaatgaagtgaaaaactatcagcgtgacggacaaatgcgttttgatgataacggcggccgctccgtctattacgagcctaacagcttcggcggcccgaaagagtcacctgaagataaacaggcggcatatcctgtatcaggtttcgcagacagtgtaagctataatcatcatgatcattacacacaagccggcgacctgtaccgcctgatgagcgaagaagagcgcgcgcgccttgtcgccaatatcgtcagtgcgatgaaacctgtggaaaaagaagaaattaagctgcgccagatcggccacttctacaaagctgatcctgaatacggcagacgcgttgccgaaggactcggactgccatcaccaaaataacatcaaaaaacctgccggtctgcccggcaggtttttcctgtttattatcaataaaaccgtttttttctcaattatacgaagtggcatgccgcaaaatgatgaagccctttttctgacagcgccggacttttctcagcacatatcttcttggctgccgggcatctcgttcggaatttacagcctgaaggcggatcagaggggctcggtatatcaccctttaaaattatccgctcccttttcactccgggatcaggaacaggcacggctgataacagcgctttcgtataaggatgaagcggccgtgaaaagagctcctcctttgacgcgtattccacaatcgtccctaaatacataatggcgaccttcgtacataagtgctccaccacgcttaaatcatgagaaatgaacaaatatgacagcccgtgctgtttttgaaggctgctgaacaaattgatcatctgcgcctggatggagacatctaacgccgccacgggttcatccataatgataaattgcggcttgagcgccattgctcttgcaatcacgatccgctgccgctgccctccggaaaattcatgcggataacggtcgataaagtttgcggaaagtccgcaggcttcaagaacttccgccgctttatcacgcgcgttccgcttcaccaccaattgatgctcgatcatcgcttcaccgatggcttctccgatccggcgccggggatttaaagaactgaacggatcttgaaagatgagctgcgcttctgatctgaaagttttgagctcgcgccggctcatccgaaacacatcacgcccctgaaaaaacacctctcccgctgttttttcatgaagcctcaaaatggtcttgccgattgatgactttccgctgcccgattctcccgctaagccgaacacttctcccttttctatcgtaaaactgacaccgtcaactgcttttacgggatttttgcgggtctttctcatccccccatgctcctcgtaatattttttcagccccctgacttccagcaatacatcactcatctgctttctcctctctgtaaagccagcacgccgcctgatgccccttcccgaattcagtaaaatgcgggctcgatttccggcatatttccatgctgtgttcacatcgctccgcaaaataacaagacgatcccgacaggtccgcaagctcggggacctgccccggaatggtgtacagcgtctcccttctttgaccgataaccggcttggccgcgagcagccctttcgtatacggatgcttcggatcagaaaacagctttgcaaccggtccttcctccacaatttttcccgcatacatgacaatcacataatcagccatttcagcaactacgccaaggtcatgagtaatgaataaaatagacatgcgaaattgctttttcatatcccgcaataaatccaatatctgcgcctgaatggttacgtcaagcgctgtcgtcggctcgtcggcaatgatcagtttcggttcgcagcttagcgcgacagccgtcatgatgcgctgcagcatgccgccgctcagttcatgaggatattggtgcataacctgctcggcatgcgggatctccactaacgtgatcagttcaacggccctccgccatgcttctttcttactcagcaataaatgttcgcgaatcggttcggccagctgctcaccgattgtaaacaccggattcaaagatgtcatcggttcctgaaatatcatcccgatttcgctgccgcggattttctgcatgtcttttggtttcaattccaacaggttccgtccggaaaaatgcaccgctccccgttcgattctccccgtctcgggaataagctgcatagtggacaatgacaccatgcttttcccgcagccggactcccctacaatacaaaccgtttcctcctcatgtatcgtaaagctgacatcgtccacggcctttaccgccccctcctctgtataaaaagccgtttccaaatgcatcacttctaaaagcggttttttcatttcattttcacctgccgttttaccttaggatcaaaagcgtctcttaaaccgtctccaagaagatgaatcgccacaacggtcagaaaaatggccgttcccggcggaatccacagccacggacggagtgtaaaatccataaaatgattcgccgcttccatcatgtttccccaagaaggtgtcggcggagcaacgccaagcccgagaaaactcagcgccgattcactcagcatcgctcccgccacatgcaaagtcgccgctaccagtaataacggcaatgtattgggaagcaaatgatagaggattttccgtttatcactaagccccaaaacttccgcggccatcataaacggctgctccttcagcgacaaaatctgtccgcgtacaagccgcgccagaccgggccatccgatcaggcttaacatcatcataatcaggtacatcctgtattcagaaggcactttccactccgacatcaccgcagccaaaatcaaaagcagcggcaggcccgggatggacatgagcatatcagcgatgcgcataatgatcatatcagcggctccccgataaaatccggccgcagccccgagtaaagaaccgatgacaagcgacagcaccattgaagcaagccccacggtcagagaaatctgccccgccagcatcagcctcgtcagcacatctctcccgtactggtcggttcccagccaatgatggattcccggctgctgattggcatttgaaatatccgtccgatctgttatgtacggagaaaaagacggcccgataaagcacaataaaaacataaaacataagaaaagaagactgatgaccgtcagcttatgatgcagcaggcggcggtacgtctgcttccaaagagaaggcggcacccctttttgttttttcatttcgaacaccccctatttcagcctgacccgcggatcaaccgcggcataagcgatatccgccaagaagttccccacaatcgttaaacaagacaaaaacaatgtaaacgccatcaaaaccggataatcacgataatgcacagattcaagctgaatacggccgacacccggccaaccgaaaatctgttcaataatgatggctccggaaaacagtcccggcagttcaaaagcaagcagggtgatggccggaatgagcgcgtttttcaacgcatgtttccagatgacggtgcgctctttcaatcctttcgctctcgccgttctgatataatcctgtctgatcacgtccagcatgccggagcggaaataccttgtcagcgagccgatgccgagcatagataaaatcacgaccggaagaatcatatgtctggcggcttcaagcacgtacgaaaaacctgtactcgtgcttccggtatcaatcatcccgccgacgggcaatattttcaaatccaccccaaaccacttaataaacagaaggctgataaaaaaagacgggaacgccatggaagcaaaaacaagaaacgtcacgatcccgtcaaaccatgagtatttcctgacagcggatatgacacccgttatcatcgcggctgaccatgtgacaagcaacgccaaaaacgcgacaaaaaacgaattccagacatatttccgaagcagtgacaggacgttctcctgatattttaaagaaaacccaaaatctccgctgagcacatttccgagccacgtcacatagcgctgccaaatcggctgatccagcccgtaaagcgcttttaactcctgcgctctttcaggagtcaggtttacattggaatcaatatagtcgcccggcagcatggcgaataagaaaaaaataataaaggacgtaccaaataagatcacaagcatttgaatgaatcgttctgcggcataccgtttcacaaaaagcccctcctttccgctgaaagggcaaaatccccgggatgcaccgggtattttgcccaaccgttctattgaattgagacatttgagagacttgaactgattccagaataattgtcaggctcaagcccttttatttttccgctgaccgcccttgcgctctgacggtaatgaatcagaatgtaaggcgggttttccccgagctcccggtacagctggtgataaatctcttttcttttgctgatatcaagcgtgccggctcctttctctatcagccggtccgctttcggattggaatatcccgttacattattgggatggccggaagccagcttttccaccgtgtcattcggatcaagaatctgcgaggtggaaacggcggcaaggtcatattgtttgtcatttattttcgctacttctgtattaaaatccatcacttccggttttaatgagattccgatgtccgcgtaattttctttcgagatcgggatgaaatcatcatccgctttagacgtgtaatagctgatttcaagctttttgccgtttttttcacgtacaccgtctttgcccgttttccagcctgcttcatcgagaagctttttggctttttcagggttaaacgcgtaccgattgacatctttgtcatcataagcccacgaaaccggagacaccggcacattcgcgacttctccgtagcgtttaaagcggacatcgacgattttttgacggtcaagtccgtaaataagcgcctgggacactttcttatctcgaaaaggcggacgcttgtgattgacgtacacaagcccgtaatcattcacgacagatacgcttatattggcaaaaccgagactttttaaatgctgaaccgtatcatcatcaggtgagaaagaagcgtaatcaaggtcacccgtttcaaacagctgaagggaagttgacggatcgataattttataaatcagcttttccgttttcggttttcctgcataatagtgttcattagcctgatagcgtatttcctgtcccggaaggtattctgtaaattgataaggtcccgctccgagcggtttggcataaagctcttttaaatagtccagtttgccgaattgatatttcttcccgtagtaggcttctgacagcacctgccctcccaaaagaagcagcgacttcgcactgactttctcagtcgtgatttgaatggttctgtcatcaaggacgcgaatgccctctatcgtctttgcctttccttctttgtaagccttaccgcctttaatataggccgtggtgatatcttcatagcccgcgtatgcaggatcatgcagcagtgttaaagtgaatgcggcatcctttgcggtcagcggtgaaccgtcgctgaaaacgagattttttcttaaacggaacgtgtatgtaagctgatctttggaaattttccagctttccgcaagagccggggcaggcttccccgttttatccagtttgactaacggttcaaaaataggatctgtcgcatttccgtcccagccgttttcgtaaaagtacggcagaaacacaccgcccggcgcggaaatcccagcaacaaaagtgtcagttctggctttcgatttagcgggaatcgccgccggatgagaagctttaaattcctttgtcttgacatgggcaatacgtgtttcttcctttttatccgccgcagatgacggttcttctccggcactcccgaacgcgcaccctgataacatgatggataccgacagcgcgagtaccgttgtttttatcctccattttctctccttcatctttatcgaacccccgcatgcttttcatctatctttatataaatctgctccatctgttcctcatttctcataatctcccgtttgtttttctctacaagcagttcgaaattcaatgtgtgttttctgtacttttttcgttttttgctctttttgcgcacatgtgataccttttttaacgccacttttcatccctccgcttttcatttcattcaatgactttcacgcaaaaaaggcccttatctgtttaaaagataagagccttcggtgatccgatcagccatcgtttggaaatatgtaatgattatgttaattcacacaatccctacctgtcaactataatttaaaatatcgtttccttccgggggttttcctcatacactctctcatttttccgcatatgctagaaaacatagcagattacaagtgaaagtgagtgagaatgtggaaaagacaacattgaccggtcgcatcgtcaaaaaagatgacccggactataatgctgcgagaaccaatatcaatttaagcctgcaaagatatccagacatcattgtgttttgtcaaaacaaacatgacgccctcaatgcggtgagatgggcgcgtgagaacaatgtgcctttccgtatcagaggcggaagacacagctacgaaaacttttctctgttaaatgacggactagtcattgatctcagtgaaatgaagaaaataagagtaaatgaggataagcggctggtctcgattgaagcgggagccgaattgggggaagtctaccggacactctggcggtacggcttgacccttcctgcgggaaccattgcgaatgtgggaatcacggggctgacgctcgggggaggaatcggatatttaacaagaactgccggacttacttgcgatcgtctcctccagctcgagatgatcatagcggacgaaaaagcgggtgctgacttgatcacagtcaaccgttcaaagcactctgatctattttgggcgtctcagggaggagggggaggcaacttcggcattgtcacatccatgatgtttaaagccgtgccgatctcgtgcgtgtctgttttttctgtcacttggggctgggatgatttcgaggaagtatttaatacgtggcagcgctgggctccatttacagacaaccggcttacctcatcaattcagttttggcctaaggaagtaaaccgcatagaagcgctcggtcaatttaccgggacaaaggatgagctgaaagaactgctggctccgttaatgaaagcgggaaaaccagcaagcggcatggtcaagacagtgccatttattaaagcggcagccttttttaacagcccgggaggcaatcagccgcaaaagatgaagcggtcaggatcctttattgaaaaaccattatcaacacgcgcaatttccactttaaagcgctatttagagcacgctccgaacgaaaacgccagtgtctggcagcagtctctcggcggggcggccggacggatcgctccggaccaaacggcattctactatcgcaacgcaatcattgcccaagaatatattacaacttggacatctgctgaagaagaaagacaaaatgtccgctggatcgaaggactgagaacgtccctatcaagagaaacgatgggagattacgtgaattggcctgatagagaaatcagaaactggctgcaaacgtattacggagaaaatgttcaccgcctccgtcaagtcaaaacgaaatacgatccggaaaatatattccgctttgaacagagcatttcgccgcttcgccgttcaccgtttttctaaaaaagatgaagatgggcaaactccatcctcatcttttcttttattgatataagcggcttcccttctctgcaaactcttttgctttttctttcagtccttcgttgacggcctcgtcttcagtaagtccgttttccttcgcataatcacgaatatcctgagaaattctcatactgcagaacttcggaccgcacatcgaacagaagtgagccgtttttgcgccttcagccggcagcgtttcatcatgatattccattgctctttcaggatcaagcgacaaatgaaattgatcacgccaccggaattcaaaccgcgccttagacagagcatcgtcacggatctgtgcacccggatgccctttagcaaggtctgcggcatgtgccgcgattttgtacgtgatgacaccttctcttacatcatcacgattcggcagccccaaatgctccttcggcgtgacatagcaaagcatcgccgtcccgtaccagccgatcatcgccgcgccgattgctgaagtaatgtggtcataacccggagcgatatccgtcgttaatggcccgagcgtgtaaaaaggcgcctctttacaaatttccagctgcttgtccatgttttccttaattttatgcatcggcacatgacccggtccttcgatcatcacttgcacatcgtgcttccacgcaatctccgtcaattctccgagagtctccaattccgcaaactgcgcttcatcattggcatccgcaatcgaaccggggcgaagcccgtcaccaagagaaaaagcgatatcataggtcttcatgatttcacaaatttcttcaaaatgcgtgtacagaaagctttcctgatgatgagccaggcaccattgcgccataatcgcccccccgcgggatacgattcccgtcgtgcgtttagccgttaacgggacgtaacgaagcagtacgccggcatggatggtgaaataatccacgccctgctccgcctgctcaatcaatgtgtcacgataaatgtcccacgttaaatcctcggcaatgccatttactttttcaagcgcctgataaatcggcaccgtccccacaggcacgggacagttgcggataatccattcacgcgtcgtatgaatgtcttttcccgtggataagtccatcatcgtatcggcgccccagcgaatcgcccacgtcattttttcgacttcttcttcgatagaagatgtaacagccgagttgccgatattggcattaattttcacatgaaaattccggccgataatcatcggctcgctttccgggtggttgacgttagaaggaataatcgcccggccgctggctacctcgtctctgacaaattcgggagacacatgctcacgtattgcgataaactccatttcaggcgtaatgatgccttttctcgcataatgcaattgtgttacatttttccccggcttggcccgaagcggtttccgctgtaggccggggtattcagcggcacggccctcttttttataaccgttgtcttcaggtctcacggtccggccgttatattcttctacatctccgcgcccggtaatccactttgtgcggagcgcccccagcccttcatgaatatcaatctgtacatctgggtctgtatacggcccgctcgtatcataaacacggaccggcgcattctcctcttccccgaatgcccccgtagtcgcactcaggctgatttcccgcatcggcactcgtatatcgggcgaagaaccttctgcataaacctttttactgccggaaaaactcgacataatggaaatgttcgcttgctgtactgattgattttgcatacaaatctctcctttatcatttgaataacagaaccaagttcagcaccagcacaaaaaaaccgggttcaaagaagaacccggttttgcagtcagaaagaaactattattgttttcatcaacaataataaaacctttacttccccacgctggtacgaaccagatcaggtccaaagggttaagaagccgccgcttctctctcagcccgctcagacgggcacccccagtaactattgatttcgctctcatcgtaacataagttgtgtacaaaaaaaagcatattatcaaaattcagataacggtacggtcataagctctgtttcccgaacgcctttttcggtattaaaaacccgataaccctttgcggtttccctggaagagacagcccggaacagctgaccgtctttataatgaagcgcagcgccgtcatcagcggcatagccctccctgagtttcttttctgaaatcagacggtgatacaccggccggcgctccgcttctccgtcatagtgcggacaaaagcttcccggcaaaaatcctaaagctcttaactctctcaaatctccagccgaatccgtcaatccttcttcataccagcaaatcgccccggcgctgagacccgccaacatgatgccgttttcccaagcctcacgaagaataaggtcaagcccccactctttccataagacaagcatattgcgcgtatttccgccgccgacatatataatatctttcttcatgagaaaggatctgagatcagaacccggcggtttaaacagcgacaagtgatccggctcacaccgcagcttttgaaaggcctgataaaacctgccgatataattctccgaatctccgcttgccgtcggcaaaaaacaaattttcggctttgaccgcgccgactgctctaaaatatactgatccagcacaagataatccggctccatggaaaagcccccgccgcccattgcaataatctgcttcaatgtcatcacctcttttttcctctagtataacagctcataaaaaggcgttatccccatttcggataccgcctttaaaaagtatttgttatctaaaaaatgaaaacgcaccgtataacacaacggagatccccgcggcgataagcgccggaacaagcttcgaacgggcatacttcacaacatcgatccccaacaccgtacaggttgtcaccgtattatcactgagaggagaagcaaacgctccaaatgttccgctcgcaaacacggccccgatcgctaataataagctggtatgtgactgaaccgccagcgttacgccgagcggcattaaaagcccccaagtcccccaagatgacccgataaaataggatataacagcccccagtataaaaagagacggcgcaataaacatatgagggatccatgacgttaaatgagaagtaacatattccgagaatcccagatcttcagatactgctgttacggcccaaatcagcgataacataataataacgttgaccaattcgtttccgcccttaataaaatgggtaacaagctcgcctgcatgaaaacgctgaaacataaaaagagcaaatgctgcaataaccgctgccaataatgcggttaacatgacgccaagcatatcgcttttgataaaagcattcaaaaacccttgtgcttttgaatggccgtcccaccagctgagaaagagtgttaatagcaaaaacagcccgatcggaatgattaaattccaaggccgaatcggtgtttccttaatataagcacggtgcgccgaatccagctcctcctgctggtcagcatgctcattactttcgaacattcccgtatgttcaccgtgaatatctgagatcgtccctgtttccatgttaaatgaacctgagctttttgaaagcaacacaccgctgttccgcggaatcggttccgtatttttgttatgtttgcgagcagaagtttgtccgctcttttctgttttttctaagctttcgcccgctttttgtttcttaaaaaagcagtaataaattccgactactataatcacaatggagaaaaaattgaagggaatacttttcacatacaccgtgtaagccggctgatctattcctgacgttttaagggcctgtccgataatggaaaccatgtagccgacaaatgccgttgctatcggaatcaaggcaatgacagggtttgccgtaaactcaatggcatacgcaattttctgtttcgacaggtccagacgcttgcttaaagctttcatgatcggtgcaattgtgacgatgcgaaagtccggttcactgaacgtgccaaatgtcgacagccatgcaagcagcatcgcaccttttttggttttaacttttttactgatcaaatggacgaatccttttatcccgccggtcagctttataatccctacaaggccggcaaatgaatatagaaacacaatgattctaatattattggtgacgacaatgttgctgattacatattgaaccatatgttcaatcccgccaagcaagctgggatgcaaaagatagcttccgaccagcaaaccgacaaacagaccggactgcacttgctttgtaatgattgaaatgggaatgaccagaataaatgggataagacaagtccaagtcccttccataaaaaacacctctttcaaagaacttcttgttagtatctttgaaaaaagcgtatttatacaatctgcacgcgtatcatgttttcacaagccttggaggatattttcacacaacaaaaaaggcttctacatattgtagaagcctttgtataccggtggccggggtcgaaccggcactccagaaggaacacgattttgagtcgtgcgcgtctgccaattccgccacaccggcatgtaattcgtcgtgttcaaccgacgtatataaatataacatgtatttcataaaacgtcaacggttttagcaaagttttttaaatggtaatgcagtatatacgatacaagcaagaaacttatattgatagtcattacgtttttattatataaaaaaagtgatctgcaatatgcaaatcactctcatatatgttttataatgtgaaaactgatgaccaatttaacatagttcgttcaaagttaaattggtgccgagggccggacttgaaccggcacggtagtcacctaccgcaggattttaagtcctgtgtgtctgccaattccaccaccccggcaatagaaaggcgacacccggattcgaaccggggataaaggttttgcagacctctgccttaccacttggctatgccgccgtaatttggagcggaagacgggattcgaacccgcgacccccaccttggcaaggtgatgttctaccactgaactacttccgcaacatgtaaaagaacttaatacatcttatgctgttgtttttaaaaaaatgcaactgggctagctggattcgaaccaacgcatgacggagtcaaagtccgttgccttaccgcttggctatagcccaatgataatatggggcgattgatgggaatcgaacccacgagtgccagagccacaatctggtgcgttaaccacttcgccacaaccgccataatctgaagatgaataaataatatagtggcaggggcagtaggaatcgaacccacaccggaggttttggagacctctgttctaccgttaaactatgcccctatttataaaatggtggaggggggcagattcgaactgccgaaccctgagggagcggatttacagtccgccgcgtttagccacttcgctacccctccatcatttagagtgccggccagaggacttgaacccccaacctactgattacaagtcagttgctctaccaattgagctagaccggcaaatggtggctcgggacggaatcgaaccgccgacacacggattttcagtccgttgctctaccaactgagctaccgagcctttttataaatggcggtccggacgggactcgaacccgcgacctcctgcgtgacaggcaggcattctaaccaactgaactaccggaccatttttttggttgcgggggcaggatttgaacctgcgaccttcgggttatgagcccgacgagctaccgaactgctccaccccgcgatgataatggtggaggatgacgggctcgaaccgccgaccctctgcttgtaaggcagatgctctcccagctgagctaatcctccatcatataagtgacccgtacgggattcgaacccgtgttaccgccgtgaaagggcggtgtcttaaccgcttgaccaacgggccctggtattttttcgtttgttatgtattgataattagtggcggagagcaagggattcgaacccttgagacggggttaccgcctacacgatttccaatcgtgctccttcggccactcggacagctctccataaatggctccgcaggtaggattcgaacctacgaccgatcggttaacagccgatagctctaccactgagctactgcggaatgaagtctgcctggcgatgtcctactctcacagggggaaacccccgactaccatcggcgctgaagagcttaacttccgtgttcggcatgggaacgggtgtgacctcttcgccatcatcaccagacattttagtgacatgtattattatactatgtatttcagaaaaagcaagagtttttttaaaaaattctctcaaaactagataacagtaagcatacattcaaattggttaagtcctcgatcgattagtatctgtcagctccatgtgtcgccacacttccacctcagacctatcaacctgatcatctttcagggatcttacttccttgcggaatgggaaatctcatcttgaggggggcttcatgcttagatgctttcagcacttatcccgtccgcacatagctacccagcgatgcccttggcagaacaactggtacaccagcggtgcgtccatcccggtcctctcgtactaaggacagctcctctcaaatttcctgcgcccgcgacggatagggaccgaactgtctcacgacgttctgaacccagctcgcgtaccgctttaatgggcgaacagcccaacccttgggaccgactacagccccaggatgcgatgagccgacatcgaggtgccaaacctccccgtcgatgtggactcttgggggagataagcctgttatccccggggtagcttttatccgttgagcgatggcccttccatgcggaaccaccggatcactaagcccgactttcgtccctgctcgacttgtaggtctcgcagtcaagctcccttgtgcctttacactctgcgaatgatttccaaccattctgagggaacctttgggcgcctccgttaccttttaggaggcgaccgccccagtcaaactgcccacctgacactgtctccccgcccgataagggcggcgggttagaaggtcaatacagccagggtagtatcccaccgatgcctccaccgaagctggcgctccggtttccaaggctcctacctatcctgtacaagctgtaccaacattcaatatcaggctgcagtaaagctccacggggtctttccgtcctgtcgcgggtaacctgcatcttcacaggtactataatttcaccgagtctctcgttgagacagtgcccagatcgttgcgcctttcgtgcgggtcggaacttacccgacaaggaatttcgctaccttaggaccgttatagttacggccgccgtttactggggcttcaattcgcaccttcgcttacgctaagcgctcctcttaaccttccagcaccgggcaggcgtcagcccctatacttcgccttacggcttcgcagagacctgtgtttttgctaaacagtcgcctgggcctattcactgcggctctctcgggcttgcaccctaacagagcaccccttctcccgaagttacggggtcattttgccgagttccttaacgagagttctctcgatcaccttaggattctctcctcgcctacctgtgtcggtttgcggtacgggcacctctcacctcgctagaggcttttcttggcagtgtggaatcaggaacttcgctactataattcgctcgccatcacagctcagccttcacgggaaacggatttgcctatttcccagcctaactgcttggacgcggatatccaataccgcgcttaccctatcctcctgcgtccccccattgctcaaatggtgaggaggtggtacaggaatatcaacctgttatccatcgcctacgcctttcggcctcggcttaggtcccgactaaccctgagcggacgagccttcctcaggaaaccttaggcattcggtggaggggattctcacccctctttcgctactcataccggcattctcacttctaagcgctccacaagtccttccggtcttgcttcacagcccttagaacgctctcctaccactgttcgtagaacagtccgcagcttcggtgatacgtttagccccggtacattttcggcgcagagtcactcgaccagtgagctattacgcactctttaaatggtggctgcttctaagccaacatcctggttgtctaagcaactccacatccttttccacttaacgtatactttgggaccttagctggcggtctgggctgtttccctttcgactacggatcttatcactcgcagtctgactcccaaggataagtcatcggcattcggagtttgactgaattcggtaacccggtaggggcccctagtccaatcagtgctctacctccgagactcttaccttgaggctagccctaaagctatttcggagagaaccagctatctccaggttcgattggcatttcacccctacccacacctcatccccgcacttttcaacgtgcgtgggttcgggcctccattcagtgttacctgaacttcaccctggacatgggtagatcacctggtttcgggtctacgaccacgtactcaattcgccctattcagactcgctttcgctgcggctccgcatcttctgcttaaccttgcacgggatcgtaactcgccggttcattctacaaaaggcacgccatcacccgttaacgggctctgactacttgtaggcacacggtttcaggatctctttcactccccttccggggtgcttttcacctttccctcacggtactggttcactatcggtcactagggagtatttagccttgggagatggtcctcccggattccgacggaatttcacgtgttccgccgtactcaggatccactcaggagagaacgaagttttgactacagggctgttacctcctatggcgggcctttccagacctcttcatctacctcgttcctttgtaactccgtacagagtgtcctacaaccccaagaggcaagcctcttggtttgggctggtcccgtttcgctcgccgctactcagggaatcgcatttgctttctcttcctccgggtacttagatgtttcagttccccgggtctgccttctcatatcctatgtattcagatatggataccactccattacgagtggtgggtttccccattcggaaatctccggatcaaagcttgcttacagctccccgaagcatatcggtgttcgtcccgtccttcatcggctcctagtgccaaggcatccaccgtgcgccctttctaacttaaccgttaaaaagaatcactacgtgatatcttgcattactaattgaatgtgaattacttctgttatctagttttcaaagaacaacgcataggacatgctaacacatgcgttgccacaggaagtggcgcatttagcaggtgttcctatgttttgaaggaatgatccttcaaaactaaacaagacagggaacgttctgtttataagacccaaggtcttatattccgttaaaatccttagaaaggaggtgatccagccgcaccttccgatacggctaccttgttacgacttcaccccaatcatctgtcccaccttcggcggctggctcctaaaaggttacctcaccgacttcgggtgttacaaactctcgtggtgtgacgggcggtgtgtacaaggcccgggaacgtattcaccgcggcatgctgatccgcgattactagcgattccagcttcacgcagtcgagttgcagactgcgatccgaactgagaacagatttgtgggattggcttaacctcgcggtttcgctgccctttgttctgtccattgtagcacgtgtgtagcccaggtcataaggggcatgatgatttgacgtcatccccaccttcctccggtttgtcaccggcagtcaccttagagtgcccaactgaatgctggcaactaagatcaagggttgcgctcgttgcgggacttaacccaacatctcacgacacgagctgacgacaaccatgcaccacctgtcactctgcccccgaaggggacgtcctatctctaggattgtcagaggatgtcaagacctggtaaggttcttcgcgttgcttcgaattaaaccacatgctccaccgcttgtgcgggcccccgtcaattcctttgagtttcagtcttgcgaccgtactccccaggcggagtgcttaatgcgttagctgcagcactaaggggcggaaaccccctaacacttagcactcatcgtttacggcgtggactaccagggtatctaatcctgttcgctccccacgctttcgctcctcagcgtcagttacagaccagagagtcgccttcgccactggtgttcctccacatctctacgcatttcaccgctacacgtggaattccactctcctcttctgcactcaagttccccagtttccaatgaccctccccggttgagccgggggctttcacatcagacttaagaaaccgcctgcgagccctttacgcccaataattccggacaacgcttgccacctacgtattaccgcggctgctggcacgtagttagccgtggctttctggttaggtaccgtcaaggtgccgccctatttgaacggcacttgttcttccctaacaacagagctttacgatccgaaaaccttcatcactcacgcggcgttgctccgtcagactttcgtccattgcggaagattccctactgctgcctcccgtaggagtctgggccgtgtctcagtcccagtgtggccgatcaccctctcaggtcggctacgcatcgtcgccttggtgagccgttacctcaccaactagctaatgcgccgcgggtccatctgtaagtggtagccgaagccaccttttatgtctgaaccatgcggttcagacaaccatccggtattagccccggtttcccggagttatcccagtcttacaggcaggttacccacgtgttactcacccgtccgccgctaacatcagggagcaagctcccatctgtccgctcgacttgcatgtattaggcacgccgccagcgttcgtcctgagccaggatcaaactctccgataaagtagtttgactgactacgcacatcgctgtgcgatttatttaaaactttgaattaacaggtacgttttgtcttgtttagttttcaaagatcatttcaacctcatctcgaggcgactttttcagtataacatttcagcgagttgctgtcaaatgtttttttgtttttatttctccgccgctgtgagctttttgttgaagcgcatcagcgacgtttaataatataccatgcctatgattcagcgtcaacactttttttgaaagaatatcctcgatgatatacttcctgccctttggtctctatttgagatacttcaacaaagcctttttccgtcaggtaatcaagcatgacaccaagatcttgggtgaagtgcaccagttcagggtgctgaagcaattctccaaactgccacatttctttttctttcatcacttgaaaaaggtgcgcagaaccgatttcagcttttgaatggatgagaaaatcatttgctaagaataataattcgagtcttttctccaaactttcgtgactctcgacaagttcggaatatagcttatatacctgcggctcaatgtgacggacctggttccagactgtcgtttcgggataaaacccccggtcaatcacttctatgcgggccaagtggtgaagagcatgcactaccgcataatatgcatccagaaaatgatcagcttcaaaaaacgcttttccttctacaaatcttctgatcagcttgccgtattccattccgatctttaatttccgctcggcgaaaggaaaagtgctgagccggtcattgagttcagatatatattcattgcggtcaaacagcactttgccgttgatgatccaatctatgactcttctattggtcccaagcagaatccattcctgaagcagagcatccgttacaatatgtaaagaagcggttttttgttcgaattcataatgctttataaaaagaggttcatcagcctgtttgacaatgacaagcatgaccgcatcaaagttatccgtgatggatgatgctttactccttctctcaatcataaggacggccagcgtatcgggatgacttgctctttcttggtaaattggacggagaagattgtccattacgattcctccaatgcgattgtttcactagctattgtttctacatttctatgataaaacatgaaagtccttttttctaaacacattgcactattataacaaatttcctttcaggttccatatttattcttcccttttcttacgaaaacatgaagaatatgccatctgttttgtgctatagttaaacgagagggggatggacatggcgaaatactcaagcaaaattaataagatcagaacgtttgcgttaagtttggttttcgttgggtttatcattatgtacatcgggctgttctttaagcagtctgttttgcttgccagcttgtttatgattctcggcctgctgtcgatcgggctcagcaccgccgtttatttttggatcggcatgctgtccacaaaagcggtccgggtgatgtgccccgcttgcgagaaagaaacgaagattctgggcagagtggatatgtgcatgcattgcagagagccgcttacattggataaaggattggaaggcaaagcgttcgatgagtcttataacagaaaaaacagtgtaaaataaacgaagctgaccgtatcaaagcggtcagcttcgtttagtggttttcttttttggaacattcttggcagacgccgtaaatctccaaacggtggtggcttaccttaaaccccgtgacgtgagccgcaagctgttccacttcgtcaagcccgggataatggaagtctacgatttttccgcagctttcacaaatggcgtgataatggtcagaggtgacaaagtcaaatctgctggacgcatctccgtacgtcagttcctttacaagccccgcttcccggaatacacgcaaattgttatacactgtcgcaacactcatattagggaatttcccttccaaggctttatatatatcgtccgctgtcggatgtgccatagaatccacgagatattccagaatggcatgacgttgaggagtaatccggactcccgtatccttcaacgtgtctaaggcttcttttaattcatgtgcagccatccgtcatgcacctctcttctaaaaaagattcttactttataatgtttataattagtgtacatctttttccggtctcctgtcaaatgtaatctgaagaaaaccccgtgagttcagcatttgtccattaattagacgcaatttgttccaattctcgaagcgcctcggcaacgtgatctttcacttttacctttctccactccttcacaagacggccttctttatctaacaaaaaagtggatcgctcgatacccatatattctttcccaaaattctttttcagcttccacacatcaaaagcttccgccaatttgtgctcatcatcaacgaggagctggaaaggaagatcgtgtttttgcttaaatttttcatgtttatcacggctgtcagggcttactccgataataaccgcatcaagtcccgcgaaactttcgtgctgatcacggaaatcacatgcttccgtcgtgcatccgggtgtcatgtctttcggataaaaatagagaacgacgtacttccctttaaaatccgtcaatgctacttcttccccgctgtcattcactaatttcatatccggtgctgtttgtccgatttcaatcgtcatttcttatacctccgggttttttattaagcgtatccaattcacgttaagattacaaccgttatccttccgctcttttctggaagcatgaaccgttgtgctcgcaatgaagcatgctacaatagaacatgatgtaaggagatattaggagggtcattttttgtatacaaaatcagttgaacttcataaggaagcgttagagcatatcgtcggaggcgtgaacagcccgtccagatcctataaagcggtaggcggcggttcacccgttgcgatggaaaaagcgaacggcgcttatttctgggatgtagacgggaatcagtatatcgattatttagcggcttacggcccgattattaccggacatgcccatccgcatattactgaagcgattaaaacagcggctgaaaacggcgtgctgtacgggacgccgaccaaacatgaggtcactttcgccaaaatgctgaaggaggccattccttcacttgataaagtacgattcgtaaactcaggcactgaagcggtaatgacaacgatccgggttgcacgcgcttatacaggccggacaaaaatcattaaattcgccggctgctatcacggccattctgatctcgtacttgtcgctgcgggttccggtccgtctacgctcggcactcctgattccgccggcgtgccgaaaagcatcgccaatgaggtgattaccgttcctttcaatgatattgaaagctacaaagccgcgctggataagtggggttcagaaattgcagcggttctcgtcgagccgatcgtcggcaacttcggcatcgttgaacctgaagaaggatttttagaacaggtaaatgaattgacccataaagcgggcgcgctcgtcatttatgatgaagtgatcacggcgttccgttttatgtacggaggcgcgcaggatcttcttcaagtgaagcctgatttaacggcgctcggtaaaattatcgggggcggcttgccgatcggcgcttacggaggcaaaaaagagatcatggagcaggttgctccgctcggcccggcatatcaagccggcacaatggccggaaacccggcatctatcctatcaggcatcgcctgcctggaagtgctgaaggaagaaggcgtttatgagcggcttgatgagctcggcgccagacttgagcacggcattctcgcccatgcggagacacacggcattaccatcaccgtcaaccgtttaaaaggcgcgctcacggtttacttcactgatgaaaagatcgtcaattacgagcaggcggaaaatacggacggagaagcattcgccaagttcttcaagctgatgcttgagcgcggcatcaatctcgctccatcgaagtatgaagcttggtttatcacaaccgcacatactgaagaggatatcgacgccactttacaagccgttgaagatgcgttcagacatatgaaaaaataactgctgaaacaagcgggagcccggggcttccgctttttctttttgtccgatttgtgagataatggttttttcaaaaaaagaccttgaataatcggtatgatccctgtatattactttattgtttagcaaatcagccgacagggaaatgtaagtgtcagccgttcgttcggcacataatttattagagaaaggaatgcacgcacaaaccaatgaaacttggtgcccgcatttttaaaacagggattgcgattacgctcgcgctctacttagcatcatggatcggacttccgtcgccgatctttgccgggattgcagccatatttgccatacagccctctatttacaggtcttttcttatcattattgatcaggttcaggcaaatatcatcggcgctgtcattgctacggcattcggactgattttcggaccgagtccgattatgatcggattgaccgcagtgattgtcatcacgatcatgttaaaactgaaaattgaacacaccatttcgattgcgctcgtgacggttatcgcaattttagaaacaccgggaaacagcttcctgacgttcgctctgatacgaacaagcaccgttattttaggcgtgctgtcttcttttattgtgaaccttgtgtttcttccgccgaaatacgaaacgaagctgactcatcatacggttgaatataccgatgagatcatgaaatggatcaggctgacgatgcgtcagtccacggaacactcgatattgaaagaggatattgagaagctgaaggaaaagatgatgaagcttgatcatacgtaccttctttataaagaggagagaagctactttaagaaaacgacgtatgtaaagtcgcgcaagcttgtattgttcagacaggcgattattacggcgaatcgggcgcttgatacgctgaaaaagctgcaccgctatgaaaacgaaatttatcatatgccggaggaatttcaggagacgctgacagaagaaattgattatctgcttcattggcatgaaaggattctgatgcggacggtcggcaagatcaaaccgcatgatgacgatgctgaagaaagcataagatataaacagcttttgacgaagtctttcttgaaaaatcagcagaactgcgaggatgaactgcttgattacaatatgctcagcattatggctgcggttgcggaataccgcgagcagctggagcatctcgatacattaattacgagttttcagacataccacccgaaagacagcgaattagaaacagacgatgatgagtaacccggtgctctagataaccgggtttttttgcattaaaaaaaacgtatgccgcccattcggacggcatacgtttttgtatcagttcaaattctgaatcgtaaataagtgtctgtactggccgccttgggccattaattcctcgtgcgtgccggtttcgacgacagcgccgttttccatgacgacaattttatccgcgtgcgtaatcgtggacagcctgtgggcgacgataaatgtcgtccggtttttcgcaagcttttccatcgcttcctgaatgtagtgttcactttccagatcaagagccgatgtcgcttcatccaagattaacagcggcggattttttaagaatacacgcgcgatggaaatccgctgtttctgcccgcctgacaatttgacgccccgttcgccgactttggtttcatagccttcggggaaattcataataaattcatgggcatttgccgctttcgcagccgcaaccacctcatccagagacgctcccggtttaccgatggcgatattttcacgaatcgtctcactgaacagaaacgtatcctgaagcaccattccgacttgattgcggaggcttctcgcttcataatcgcgaatatctgtgccgtcaatcagcaggctgccgccggatacatcataaaaacgcggtatgaggctgacaagcgtcgatttaccgccgccgctcatcccgacgagcgcgacggtttccccttttgtcacctttaaggaaacgtcctgcaaaatcgtttcttttccttcctcataacggaacgagacatttcggaattcaacttcgcccttaatgccgtcagcttttactgcattcggtttatcagtcagttcatacggctcgtcgataaattcaaatatgcggtccattgaagcgatcgactgggtcagcgtcgtcgatgagttgatcaatcttctgaccggattgtacattctgtcaatatagccgacgaacgcaaccatcgtccctaccgtcagcggaccgtttatgacaaaataacccgcaaacgcgataacgagcagcggcgccaaatccgtaatggtattcacgactgcaaacgtttttgcgttccaattcgtatgacggatcgctctgtccagaaaatgtccgtttttttcatcaaaattggcttgttcataatcttcaatggcaaaacttctgatgacgggcatcccctgaactcgttcgtgcaaatgtccctgaacttgggcgagtgcctgagaacgctcccgtgtcagttttcggagacggccgtaaaagtatttcactgaaattccgtataacggaaacaaaatgacagatatcaatgtcagcttgacatcgagtgtaaacataatgcagatgacgatcagcaccgtcatcatatcaagccagatattcatcagtcccgttatgacaaagtcttttgtctgttcgacatcatttatcacccgggaaatgacttcgcccgttctcgtgttggcataaaacctcaggctcaatttttgaatatgatcaaacaatactcccctgatatcatagagcacccggctgcccgtccattgcgcgaagtattgccgatagtactctaccgggggacgcagaattaaaaacagcacgaacatgatgcccattatcgtgaatagcgatgatgttttagcgcttgccgttccgctcccttgaataatgtcatcgaccacgtattttaacagaagcgggagagccagcgggatggagaattttatgatgccgattaacactgtgattaaaatttgttttttataaggttttacaaattgcatatagcgtctgattacgcccacactttatccccctctctctttaaggcgtgtgagcccatgtgaaaaacctgttgacaccccaacaggttttttattgtattctttattttgtatagcgcagataccgttcataccacatatcaacaaattccggagcaaacggtcctttccgctgatgaatccagtgcagcagcgtattcagatactccttcagaatgctgtcgatctctttagggtaattcattgatttgcggtggtcatcgtattcatcctcgtcaagaatgttatacgtcatatccggaaacaccttgacatccaaatcgtaatcaatatatttgatggcctctccgtcataagcgaacggcgagctgatgttgcaataatagtgtaccccgtcatctctcagcattccgatgacgttaaaccactgacgggcatgaaagtagcagatcgccggttctctcgtcacccacgtccgtccgtcggattccgtcaccattgtccggtcgttggctccgatgatacacaattccgtactttttaaaatcgtcgtttcattccaaattcgatgaagcagcccgttatgcttatagctgtgaatttgaatggtttctccttccttgggatatcccatatttctcccctactttctgtaaagccctgcagtcaatgcagccgcaattgctttccgacaagtcttttcactattataacgttacgaattaaaaaatgaaaataaaagaaccactccgcttccggaatggcacattcatttctgcacataggaagacggcttttccgtgctgcgataagactggatgacttgctctgtctgcctttggaataactcctgtatgccggccaggtcttttcgctttgtcgcaatttcgtcctgtacattgtccagctttgcatctctttccagactgatgagttccgcttccacctgccggcagcggtcaagttctgactgcaactcgagaagctgatccatgattttcatctgttcacttacaagcttttcaaactctgacatcgggttcctccttaggcttttaggttgatactccttaccatttcgattttacgccggaaaaccctttgactcattctgtagaggaatcacaagttttgtcgttttggcaacagaaaaaagcacttccatccgaagatgaagtgctttttcgtttcagtgattagctgttttgctgtttgttttgttcagcagattggttttgctttctaacctgctgcgcatcagtttcactgccgaattcagtgccgtattgaccctgaccggaagctgattgctggttttgtcttttcacctgctgaacgtctgttttgctgtattttgagtttgccattgttatcacctccacgcactttagaatgcgcaggagacgataaggctattcatctttttttaaaacttatacgagcagagaacgtccgccgtcaataatgatggtctggccgcggatcatgtccgcttttgaagaaactaaaaactccaccgtatcgatcatatctttaatttcgaccattctgccggccggcgtattttggcgggcatcttccagcagttcatctctgttagggaaatgcttcagcgcgtccgtatcaatcgctccgcctgacaccgcgtttacgatgatatttttcgaagacagctcaaccgccagataacgggttaacgattctaaagcggcttttgagactccgaccgtcgtatagttttcaagatagcggatgctgccgagcgagctgatgctgacgatgtggccgcctccgtttttctccatcatctttgccgcttcctgggcgcagaaaagcaatgctttcgcattgatattcatcgtccagtcccagtgtgtttcttcgagttccatgaccggtctcagcacgcctgaagccgcattattgacgaacacgtccagtctgccgaatgtttcgtcaatctggcggaacatgtctttgatttttgccggctggccgacattggctttaatgacgagcgttttaacgccgagtttttcaatttcttcggcggtttctaatgccgcttttttactgcgggcgtaattgatgacgatgttgtatcctttttccgcgagtctgatggcggctgctttcccgacgcctcggctgcttcccgtgatcagtgcgcatttattttgttccatttttcctcagctccttgctgtgtatagttcttttcattcaacaaacaataaaagcaatatgtgttgaaaggggtcttttatatgtatgtcggacgtgatatgggcgaattggccatgatgcccaaaaaagattggagagattcagagctcgcctatttccatcatgccttccagcaaattatgccgtatttaaacgaagaaggccagtccaaataccgggaactgattcaggaaatcgaagcccgcggcggactgaaacggaatgaagcggattacggccacggcactcgcgtcagctatgactgacgctttttacaggcggccgctttcttccgccattttccatatcttttgatgggaaacgggaaatgcgtattcctcgagctcctcttttgtgacccgtatgaattccgttgtatccgacacttgttttactttaccgaaaaagaccgaaatattccagacgagatgggtgaaaacatgttctacgataccttccagctccccgatttcagcggttgttcccatctctttttctaaataggcttcaagctgctctctttcggttttgattcctttctgggtttcggtattcggaaactcccacaagttggcgagcaagccttttggcggccgtttatgaatatagacatcgtcttgatcgtctgtcagcacaacggctgccattgtttttattccgggctttttctttttgcttttaacgggcagctcccgctctgtcccttccgcaaatgccgagcagtgcttttgtacggggcaaagcaggcaggacggcgatttcggggtgcagatgatcgcgccgagctccattaaaccctgattgaattcagatggtttttcatgagaaatgaaagcggataccgcctgttcgaaaatggttctggttttaggttttgcgatatcgtcccatatggaaagaattctcgacatgacacgcatcacattgccgtctacggcggggatcggtttgttgtatgcgatgctgagcacggcgccttttgtataagggccgacgcctttcagtccgccaaattccttttcctcggcagggacgactcccccgtaccgctcatgcacttcttttacggcactttgcagatttcttacacgggagtaataacccagcccttcccaggctttgagcactttttcctcatcggcttcagcgagcgccgaaacggtcggaaattgctcaacaaaccgccggaaataagggataacggtttctacgcgcgtctgctgcagcatcacctctgacacccacacccgatacgggtcctgattttctctccacggcagaattctctgttctctttcgaaccatgtaattaagtcctcgcgaaatttgtctatatctttttgtttcattttttcttcaagtgcgttcatatcttctcctcagatgtttcgggttccgcttttcttgacaccgtattttggtgtaaacttagggcacgttacgataatatgttacattaaatagtgataaagaaaaagcggaaacatatgagaacggcggataaacgccatgattgggcaaacagaaaatggggaatatcttataatgcgaaatatgcgggcgactgattgttaacgcctgctaggaggtcaacaatggatactggcactcacgttgtcatgggtatcgcgcttggcggaatcgcaactcttgatcctgccgtcggcatgcacacccccatgtctcaggcagttatgatcgccgctcttgccggctctcaggcacctgatattgataccatattgaagctgaaaaataatgccgtttatattcgaaatcatagagggttcacgcactccattcccgccgttttattttggtccgttctgattccgggtattttgtttatgttttatccggaagcgaactttttgcacctgtggctgtggacgcttctcgctgtcgttttgcatgtgtttgttgacatttttaacgcgtacggcacgcaggccatccgcccgttttcgagaaaatggatcgctctcggtttaatcaatacctttgatccgtttattttcgtcagccatttggccgcgattgccgtgtggtatatcggaggtcatccgggcgtgacatttctgatgctttatatcatcctcacaggatattacgccgtccggtttttgatgcagctgcggataaagcgaaggctgcgcgaaatgattgaagaggagattgaaaccatcattatttcgccgacgatgaaattcaggcagtggcgtatcgccgtgacgacggcgcatgccttttatgtcggcagaagccttgacggccatgtcgtgatattggatacattcaaccgcgtgcccgttcctgaaaccgatgtaatgaaggccgcaaaacaggacgaaaatattgcagcctttctttcattttcccccgtttacaggtgggaggtcgatacctttaaagatcattatgaggtgcgttttattgatttacgctaccggagcaaaggccactatccttttgtcgccatcgtccacctcagtcatgatttagagcttctctcttcttacacgggctggattttcagcgaggaaaaattgcagaaaaaattaaaactcggctctgtttaagagccgggctttttttgtcttctcacatatatagccgcaaacacgaggctgatcaccgatagagcggccgcgggtttaaaaaacggcgggtaatacgttaattgaatatcgttttttcctttttgcgctttaaatccgatgaaggaataatccgcttttttaatctgctctttcctgccgtttatcttcagctcccagcctttttcatatggaatcggaagcatgatatacggcgcgcgggttttgttatcatacgagatatgaagcgtatttccgcgccagctgagatcggcccgcagttctttttccgcttttcggtatgcgcttttcagcgtatcgtattgttcttcataaagcgccagtctgtcaagctgatacgatcctttcggcagacggatttggatgttttttgttttcggcactctgacagtaagatcgttgacacctgttttgtaaatggattgattcgattttctcgttgtcgtgtaatcgttcacttttaatgtaaagccctggtccttcgctttattcttcaaataaaagctgacgtaataatcgccgccgtccatcttagcggcttgcggcgtaatgatcaggccgccgccgtcttcgtttaccgtcaggatgccgttatgataatcgccatgttcggccgctacctctgcatggcggatcatatttttcgcctcagtcgcttttttcgtgttggttgtgcttgattccatgacgatcccgtcaagcattgcccgttccctggcaagggcgggcgcttttttcaggccgccctcgttatacacgcgatcggctgtccgtacgaacggaagcatatattgattttgataaaccgcataatgggttgattccatgatttttttgaacccgtacggcacgccggcctcgtttgttttttccgtcatataatattttccgtaaagcaggctgtataaattagccctgtttcctaatgtcgcatagcggctgacgctttctctgcccatgtcaatctggaggtcgtgccagtaaaaggacagcagattgcggttcagtatacttgagtatacgctgaatccgttgaacccgtatatgatcggggtgttattgaaaacaccgttcatccaatctaaacgggcaaacggatcagggtctttttctttcaggcgctgaatgagctctgattgctctttgcctttatagtcagcacccgtcataaatgtatgcgataccgtataaatcttcccgccttctgataaagcatatttttcatatgtattagccgtaagcaccgccgtaagcaaaatgacggcatagacggcgggcaccgcgcctttcagtcttgtctttgctgcaaagaaagcggctatgctcagcaccagaagaaggatgacgggcaggttggcgtgatcagaaatatccagactgtaccgcctcacctggctccaatagagcagaacgacgagtacggcggacatcagcatactcttcatgctgatgtctgaaagcttagaaagcccggctgaaaccgttccggcaatcgtgaagcacaggacgtattcaaacctgttctgcggagctgaaaaaccgttaaaggcacttgccgcgaacggactgaagtgaaacagaatatacagcagactgattcccgcaaacagccggaacaagcggtttttgtataaagtaaatgtaaatagaaaaagcaaaaaagccgccggcaggatgattatccggctagaaaataaaatgttgtcggaaaaatcaagccatgcaatatgctctgaatacggaggccgcagattatgaaggtatccgtatacgacaggaataaaggaaactgcgcttatgccgaacccgagaaggcccgacagaataaatatcctgcattgagtgagcctttccgcctcattgccttcaagggggatcacccacctgaataagatataaacgccgatgaaaatcagattaatatacgcaaaataaaagttgttgatcaatgtcagcgcacaggcgaagataaaccacgccggctttttttcccggatgattttttccgcgcccaacacaagcaacggcagccacaccatactgtcagtgaaaaagtcccaatatacctcatgccggaagtagataatcgagaccccgtacaacacggcgcccgcaaaagcaggcaccgtccgtttgacgaaataacggaacacacacgccgctgtgaatatgatcaaactctgcttggcgatgctgataaaaacggaggcctgcgcccaaaacagcgcatcagcctcacccgtcagctgaataagctgcaaaaagcggacagcggcggagataaacaggaatagaaaagaagtagagaaataatagccgagctgactgtacacgcccccgcccagtccgaacgaatagctgtaaaacagcctgccgttcatatattgatcaaacagcagctttttgaagaccgccatttgggcgatcccgtctccagaccccgtcatatagcggccttgcgaccactcttttaagaaaaaaatatgagcggctgccgcagccagcacacaggctgccggcaagatccatttgttttttttcatacaacgtccccagaccctgcgcacagcggcgcctgtttaatggttccacttgcgcttttttgtataattcgtttcattttgttctccgtacgttatattcgcttctttaattaaatagtgcgggcgtttttttgtttcatagtaaatccggccgatgtattctccgatgatgccgagactcaaaagctggatgccccctaaaaacagcacggcggaaataatggtgaagtatccgggtacggacacgccgtgtgtcagaatatgaacaaaggtcgttacaatataaaccatcgacaaaagcaatatcagaataccggtgaaaaagcataccctaaggggcttgttgttgaaggagacgacaccgtccattccgtagttgaacagattgctgaatgaccatttggacgtgccgttcttcctttcgacattttcataaaatacgattttctggtcaaacccgatccagcagaacagccctttcgagaaacggtttccttcactcagcttcaaaagggcatcaacggcctgccggctcagcaggcggaaatctccgaccccgtcacgcaggtccacttcgacggctttgttgataaatttataatacagggaagaaagcacggaacgcacggggctgtccccttttcggttgcgctgcgcgatgacttggtcatacccttcttcatagccttgaatgaagtctttcagcagatgggtcggatgctgcagatcggcgtccatcacgattaccgcttcgccctgcacgtgttcaaatcctgccaaaatggccgcttctttcccgaagttgcgggaaaaagatatgtatttgacgcgatggtttctggcggccagttctttaatctgctgaagggtgtcatccgcgcttccgtcattgatgtagaaaatttcatagtcataatgaatcgtctgaaactctttttttaaagattcatggatgagcttgacgttgttcccttcattgtaagacggaataataattgagattaacctttgtttcatgaaggcaccttctttgtattattctttttttaggacggccttaaaggaattgtccgcaaaacttcagtaaggcttttcctttttttaatgacgtttaaaccctttttttgttacagggaaagaaaattttttctgcatatgatttatattttgtcatgtttttcggcagatatgagaaaaaaaagaaaaagtctgtacgcgggacagactttattgctgaaggtattcatgaatcaaatggctgacaatgcgcggtttttcgtgaatgacccaatgtgaggcatcatctatgaagattaagtcgccgtttggaatcatccgttttgtttccttggcgagctttttgctcagcgctcggtcattgacgccccatattaatcggtacggaacgggcattttaagcggaacggcagggcctaaaccgccggctctgatcgcccggtaccagttcagcatcgccgtgagcgctccttttctgccccaagcttctttgtagctgtcgacatcttcccgtgaaaaaagcgccgggcgttcagataagccgatcgcgtgatccaatacgcggtaatcgtcttcagacaatctccgttccggcttttccggaagctgaaagaacgcgatataagagcttttcttccactgcggcgggtagaacggtgtgaccttccgcataaccgccgggtgcgggatattgaccgtgatcaatttttcaacgtattgcggccgcgtggatgccaaatgccaggccacggctcctccccaatcgtggccgatgacgacggctttgtcatctgtaaaatgagtgatcagcccgataatgtcgtctctgagcgtatcaatggtatagttttcaatgccctccggtttgtcactgagattatagccgcgctgatcaggcacgacaacatggtatccggcatccgccagcggtttgatctggctcttccagccgtaccagaattccggaaacccgtgcagcagcaccgccaaaggaccgtctttcggaccggttgaagccgtgtgcagcgtcactccgtttgtttcgatcatgtgaaacgtaatgtcattcatcgattctcctccccgtttgtttcaatcttctttctgttaagacgatgatcagtacgctgatcgcaatcaataatacggcctgaacgatcagggcgaacggctgagtcagccggataagcaggctgcccgcaaatccagctgccgccgatataaggccgaacaaaatcatgagaagcgcactgaatcgattgccttctttccactgcgactcatccgccatagagcgcttcgtccgatatccgtacaggctgttgatcgacttcggcggaaaaaatgtgactaaaatgccggccgcagccatcagaaggccgccgatcaccattatcatatccctcactctccttttcatcttttacgaaaggaaaggcggaaggtttcagaaaaaaagcaggctcattcgcctgcctgaatctttatttttgagttaagtcggccgttttcacataacctgctttcccgccgtatgtgacgtacgcccatttacggtcaaaccctccgtcatggctgaacccccagccgagcacattgacggtttcacccgctttaacggacccttttttgccggtttccaaagtcggcgtataaaaagcggtttgtttcgcggtcaccgccttcaccggctgcttcatcagaaaatgcgtggaaatataggctttgtgccctttgtagtcaatctcagcccaatctgctccttgaagccgtttaacctttacggaatcctctgaacgaagcgtgccgataatcgacccttgtttatttggttctttgcggacgttaagttctcctgctttcacgatatatgtatctgctgcggtgtctatttttgtctgctgaactgctgcggcattcgctgccggatcaaaaaaaacggtgcctgcggctaaaaataagcaaagtcctgcggccggaataaatgcggttaacccctttttcatgttcattgtggttcctccccgctattttataagttattacacatttccacattccgccggtcgccaaacatgatttttctatttcttttataaaaagtaaaaaccgccggacgatatccggcgggcgaactgctatgttaatgcaggagacccctgctttgatccaaataatgagaaacgtcttcccgaacgctctggaacatatggagcttgctgccgtatgattcgatccattccttgacgacgcgttccgtcatttgctctccttgatacgggcggccggcttttgcgtaagtcgcttcgaaatctccccataaaagctcaacccaagttcgcgcttgcaaatagctgagcatgtcatttttctcaagcagcaaattcgtcagtttgtcgatatatgtattcatctctctgtctcctttccttgggaaaacctgctgcttttacgcagcttgtcacaggcatatactaactttacgtcttcagtccagaaggcgcaaccttttgatattggccgagggggaaaacaaatggtccggaacaaggcaaaaggatttcctaatcagaacaataataagtttgaaggcgaaccgcgggcaaaggatgactacgcttctaaacgggcggacggttcaattaattcgcacccgcaagaacgcatgagagcttcaggcagacgataacacacacaccgtaagagaccgggaatgacccggtcttttttttgcggaaaaaaacatccttttgcggtcataacgctaaataaattccataatatgttaaatgttaaaacgaaagccggtagacaaaaaaggaggggttttataaaatgaagacagtttcaaaacgattgctgagccttaccgcattcttactgtcagtttcattatttgctgtttcagctgaagcagcgggcagcccgcagacatctgtatcaaacagcggtgaggagtttgacgcacatcagaatcagcctgtacaaacaacacagacatcccccgcttatgaaggaacgggcctcatcaaaagacagcttgcacaaaacagcaaagctgacatcaagtcattaaagccttccagtattattgggacagacgaacgaatcagaatttctcctacaacatcatttccatatcgagcgacagcacagctgaccgttacatacagcggcagcacaagcacctacggatgcaccggtttttttgtcaatgccgacacgatcgttacggcgggacattgcgtgtatgaccagaaaaacggctgggcatcaaaaattacggcagctcccggccgcaacggatcatcgtacccgtacggctcttattcaggcaagacattctacagtgtcaaagggtggacagaaaacggtgacacaaactacgactacggcgcaatcaaagtaaacgggtcgcccgggaatactgtcggctggtacggctaccggacgaccaacagttccagtccggccgggctttcctcaaccgtgacaggatatccgtgcgacaaagtgtccggttccatgtggtcagacagcaagccgattcgttctgccgagacatataaactcacttatacgacagatacgttcggctgccagagcggatcgcccgtttaccgcaattacagcgacaccggccagaccgccattgccattcatacaaacggcgggtcgtcttacaatctgggaacaagggtgacaaacagtgtattcgacaacattcaatattggtcaaatcaataaagcttttgttttctttctcgcggcggccgttttatgcggatgcggcaaagcggatgattccgccgccaaaaaagcattgcccgttacgctccatgttgaggatgcagaaggctcaccggcggccggtgtgacggtcaccgtgatgaaagcggcggagtcagatcatcagccgaatatagaccgcggagagataataggcaagactgatcaccacggcgagattgcatggaaaagcggcgcgaaaggaacctatgccgtcgtttttgaaaaagacggagtaccggaaacccggaatatttccttagctgagagtgataaacatacggtgatcagcattacattgaaacactgaaaaaagcttgcaggcggaatatcccctgcaagctttttgttatcctttatgcacttggtattcatagacatctttcttctcagacagatgagcgaacgtggaaagcacaaggccgagagccgtcatcagcgcaccgccggcaaacagccatgagtaagatcccgttcccccgagaatcaatccgccgatccaggcgccgagcgcgtttgccaggttaaaggcggaaacgctcaccgcagcggcgattgtcgtgccgttttctgaggaagaaataaccttggtctgcaaaagcggcggcgtgccgaacgcacatgcgccgaataaaaatgtcgctgaaaccgcggcggcgggaaaaacagcgatataagggaaaatcgccaagacgccgatcaagccgatcatcacaccgatcatcgtgcgtgtcagcagtttgagcggcactttccccgcgaagaaattccccgccactccgccgagaccgtaggcaaataatgcgcctgtgatgccgactgtgccgaaccccgctgaatctcttaaaatcggctcaataaacgtgtaagcgataaatacgcctgagtagccgagaatggtgatcgcaaaggaaaaaatcacttgcttatgcttaaagacactccattcattcatcagcatcggaatcactttcggtttccggttcggtacgaccagcatcagtccgatcagcccgatcatgcctaaaacggaaataatgaaaaagacggcccgccagttaagggcatctcctaaataagagccgaacgggacaccgagcatcagcgccacggttaatccgccgttcatggaagccgcggcggcggaacgtttttcaggcggcaccatttcactcgcaaacaccatggcgatcgcaaaaaaagctccgtggatggatgcggataaaattctggaaatcgccagcacggcgaagtttggcgcaaagacgctcatcaggttggcaaggacgaagatgcccattaaccctagcaacaccggctttcttggcagcttaaccgcgataatggttacgatcgggcccgtcaggcagacgctcgccgcgtacgccgtaacaagcatgcccgctgaagatacatgtatatgaaagtcatcggcaatcgacgtcagaatacccatgacagcatattccgtatacccgatggaaaatgtgcaaatcattaacacaaaaatcattaatttcacagatggctgtttcattttgatattcaacgcaaatcgcctcctttttatttaaaaaacaacgaattccatcttaaaagatatcaaaaatgaattcaatcattttttactgaaagtatgaaacgaatgtgcccgaaaagaaaaagaggccggaaccggcctcttttgttattttttttcttttaaaacggaaatcggcagtgcttcttccccgtcagacggggaagatctgtgtccccaggcgaatacgccgttgatgtaatcaatgcggaaagtgtcatcagaaccttctatctgatacaccccgccgggccgaaagtcttccgggttcagcatgtaagctttggccatcgtaattttccgttcaagcacggccagttcatttacaatgcccatctgttccgcttttcgcgctttttccgtcagtcccgcaatttctgtctgtagttcatgaggcgtcatttgactgtatcgtttgtccatttcagtttactcctcttcctgcaagaattgatcaatatcgtcaatcgagaatccttttctgaataagtactgtttgaccttcattccgctttcataactgccgtcatagcggtatttcctgatcgctttttccgcatgagccttcagagcttccatctcggcttcatcatcattttcatactccgtctgttccagagcggcattgatgacgtcgaaagggaaaccttttcgctgaagctgcatctgcgcccgctgtctgatctcttttgtggacagctttttgtcttttttcaggattttgccgatatgtttcagcgcttcttgtatctgctcatcaaatgtaaacgcactgagcgtctccttgatggtatcgtcgtctattcctttcgctttcagctcgcggaacaggacgtcagggcctttgccgtttgtttttttgtgggtgctcgcataggcttcggcaaattctttgtcatttaagtagctgtaatcgtacagtttatggatgacttcagaaatgaccatgtccggtgtttcttttttcttcagatgatcccggacttctttttcagagcgcatccggtatgataaaaattctacggcgcggttaaaggcttttttcacgtcatcgccgtactggatttcaagaatgtcaagctcgtccagttctttcccttttttcaggtcaaaacgcacaagcacgtcggcgtcgacgctgaatgcatatttctcatcaagaaagatgttgaagcgctcggtatttttcttttgggtcgatatttttgtaataaacggcatcccggtctcctttcccgccccgatgttcaggcgtttttctttttggcaaatgaggtacagtatatgtatcaacgtgtaaggagagatggatatgaatatcgcgatgacaggcggcactggttttctgggccggcatctgacaggtgtgtttacccgccggggacatcatgtctatattttatcaagaaaacagagagaaaccgaacaaaaaaatgtgacatatgttcaatggctggccgaaaacgcggcgcctgagcgcgagcttccccctattgatgtatgggtgaacctcgccggcaaatccatctttgaccgctggacggacacaacgaaggaacaaatcatctcaagcagaatagaagcgacgagagaagtcagacggattatgaagcagcagccgaaaaaaccccgggctttaattcaggcaagcgccgtcggcatttacggcacaagcacagaaaaaacgttcaccgaacagtcagatacgtcaaatgaagattttctcagtcatacggctcatatgtgggaacgtgaaggccagaaaattgaagcgctcggcatccggacggtatatgccagatttggggtgatgctcggtgaaaaaggcgccctgccgctcatggttctcccttataagctgttagccggaggcaccgtcggctctggacggcaatggctgtcatgggttcatgtcgatgacgccgcggaacttattgcttttgcggcggagcatgatgacttgtccggtcccatgaatgtgacatcgccgaaccccgtagaaatgaagcaattcggaaagacgatcgcaagtgtcctgcaccgcccccattggattcccgtaccggaattttttctggagaaggccttgggagaaatgagcctgctgatcgtaaaaggccagcgcgccctgcctaagcaggcgctgacatccggttttcaatttacgtatgaagaacttgatttggctttaaaggatctcttatctgcataaaaacggaaataaaagccaatcctattggtattctgttttgaaggagggtcttcttttatggaaaagaagcgtgaaaaacatcagcagggagccaatctgaaaaaaatgcaggaagtcctttattccggtgaattcaaaaaagcggaaagagcagccaaacggaaataaactgaataaagatcgggaccgggcagatactatgtttgtttgatatcacttttttcagggggcgattgatatgggcagaaatcatactcacaaaaaccgtgataaaaacaaacaaaaacttcctcaagttccggatgctttgaaacacgaaacagacggcacgtacgaggaatattcaagcgagcttgctgattccgctgaccgcgaagcgcaggcgcggatgaaagccgctgacaacagagctaaaagcaaaacccgttaatacgaaatccccgcctctgtatagagacggggattttttttacagttcggtaaacaggctttttgccggcgtccgttctttcgccttaggctgttcatccggatagcccgtttgaatgatggcggcaaagcgctcattgtcagcaaggccgaagtcttggtgcacctgtttgtcatacataatgcggccgcttttccagaccatgccgatgccgttttcatgtgcgagaagctgaaggttttgaatcatgccgctcagcgccgcgaaatcatcgtttctcgtaaattcattttcatcttcttttaagacgaccagcaaaaatcccggaacggcgctgagattttttctcatgttccgctctttttcctcgttgaaatcatcttttatctttttgaaaaatgagacgtagctgtccgcaagctttgcttttcccgcttcgcttgctgcgtagataaaacgccatggctccgtcagtctgtggttcggtgcgtaaacggccgtttcaagcatatctaatatgacttcagaaggtacggtttccggtttaaacgaccggatggatcttctgtttctgattgtatgtgcaagactttcgttttgctgtaattgttcggttttcggcatgccgattcaccttcctatccaaatgaaaatgattatcatttataatataacggatacgaccggcatttgtaaaccgttacggaagctgaaaattgattgtttcggcatacacggccgttcccgtcatcttgatgttcatctctccgttttcctccgcgatcctgatttccacttttccgtctttcccgatttcctggccttgttcaatcgtaaggcattcggcttcggagcctccgtattgccgcatataggctgccatgacgcctgaagcggttcccgtgacgggatcttcggtcgttccggagaaaggggaagaaaaatggcgtccgtgcagatcactttccggatgaacggtttccagagaaaacggatgaacgctcgctttcggaagatcgcgcaaaatagcgggaaattgtgcgttgtccggcaccatattccgtgatgctttaagtgatctcagcggaacaatcagtgtccagatccccgttgatccgtaaacaatcggcagcccgctgtgaaaatcctcagccgtaatcccgagcgaggcggcaagcttttctttgtcgcccgtaaacggcagaaattgcgggggagcctgttcgagtgtgatgtatacccggccgtttcgttcagcggcttttgcgggaagaatgccggcttttgtttcaatttgatatgtctgatcagcctgaagccttcccttttcaattaatgcgtaaagagaggcgacggtagcatgtccgcataaattcatttcgtggccgggtgtaaaatagcggatgcgcagatcggcttctccgcttttacagagaaatgaggtttcattgtaccctgccatttcggcgatcatctgcatctcttcatctgaataatcatctccgttaaagacgattcccgcgggatttcccaaatcaggaatattggaaaacgcttcatatttaaacacggttgcctgtttcattcatcagccttcctttcaccttatgatcatgttattcagtataacagagtgaaattagaatttttagttaattcttcgaaaaaaaagacgccttttaacggcgtctttttttggtttttccgatcaggcgggtgacgagaatcatcgtgacggacagcgatctgtttttgcggtacgccaagtatttcccgcgccactccggtttgtatttttctttaaaggcccgcagcccgctgaagctgtacatataccggacgttgttgaagatgacggccgcgattctttccgaccagaaagatgtaaaagccgttcctacgtttgacaaaggcgccatgcccatattgaaggtggtatagcctttttcctgcgcccagagaaacagacggatgaaaagcgcgtccataataccgttcggcgcgcttttccgataacgcatcaagtcgacggatatctcgccttcctgatacatcggcatcaggttggcaaaagcgatgatctccccttccgcgtctttcacgtaagcaatcggcgcctgttccaaataatcccggtcgaagaaaccgagagaaaaacctttctcttttttcggtccgagccattcgtccgaaatgtctttcagcttggcgataaactcggaggaaaacggcggttccccgacatgaaatgtgtagccttcgcggtcaaatttgttgttaatcgcccgcagccccgcttttttcttacctgagagcgtaaaggcctccatatccacgaacgcttcttctccaagcttgaagaagttatagccgaagtcatgatacagcgccagatcttcacgttcgatctgataaaacatgacactcagcccctgcttatgcgcttcattcagaaattcttcaatcacaagcggaaaagagtctctctgtcctgacggatcaccgagcacgacaagccttctggaaatctggctgaacaataaaagcgctttgccgtcgcttgagaaataaaaccgcttatccccgagaaagccgagatggctgagtgcgtttccgccttcttccgccaaaaaggacttcagccgttcaggatcggccttttctccgatcggcttcgatcttttatgataaaagaacgtaaacaaaaggaaaaacagcggcacaacaataatggccgtcatcgtggcatatgtaatgtgcgaattgttatggacgaaataatcgtggcgcagcagccgattcattttatcccaaataaagccggcaatgagattgtagttaaacaaggcgataataaacagagcggccgcaaaaatcatctggccgagcgtatacgaagcctgctctctgataaactgccgctttaacagcacaagcaatacgatgacgacaggcagaataaagatcgcgctgatgttcaatccttttaagaaactgaacacaaaaccgccgaccagcgcggcaaccgccattgaataagaacgtttcgtccgtttgtataattcaatcggcaagattaaaagaatcaaagccgcgcttaacgataacgcgttaaacgcaaggagcgccgggcgcggaatatgcgggatgaccgtctccctgtcaatcggcagggcgacggacgccagcacgaccactcccgccatgaaaaccaaaagcgacagcgaaccgtaaagcaccctgattaagatagcgcgctggaatacgagaagcacgttcgtcgtttccacggcgggcgccatcttcggatttgattccagccgtttaagcgtattttccgttaaatcgccagccgcaaagaacagcccgaacacaaacggaataaatgaatacacaatccggtagatgacgatggatgtcacaaccgcctcctgcggaaagcccatattctgcatgccgagcagaaacagaaggtcaaacgaaccgaatcctcccggcacaagactgatgattcccccgatagcggcaatggcaaatacaccgaatacatggcggacatccgcgtgaattcccatgacatacaaggaataatacatgacgacagccgccgcaaaccattcagcaaacgatgccccgatgtaagaaaaaaccggatgcctcggttttgcttcaccgtcttctgcgccagcttttttattgttgatcccagcggcgattaaggctgccggcacaataagcgccactccggcgataacagcccacagccacggtttctcacctgtaatctctccaaccggcagaacgcgggcgatggtcaggatactgaagacggacagcccgagcagcgctgaggacgtaagccaggcgatgcctgcgacgaggcgttttacgtcattcgtatgttctttgtaaagcatcgtccgcagcccgacacccgccagaccgccgaatccaaggacattgttaaaggaattggcgataaaagagaccctgaatactttccaattcggaatgttgaggcgaagcgtccgtttcagcacaaagtcataaaaggacattgcgctgacggcaagaaggccgagcagaacgagaataaataaatcgtaacgctcaatcccgttaataatgtacagcgttcgtttaaaagaaaggtctgtcaattcctttttggactgataaatgactaaaagcaaaactgcaataggaaataatacttttaatatcgataaggcattctttttagtcagcaatgttctctccaatcatcataaaatagcttatttattataattcccccaataatctccaacatattatacactaccacctcacattcaaacaaaactcgtctgcaactttctttctctgattaaaatcagtaatatggtatgcaggagtataaatgaggaagtgagacgatggattataatctgtatgatacaacagtattaagcggcgatattttttctcctgaggaacgggatatttgggtgctgtacatgaaagtgatgacatcggcggggctcggcgatgtgtcggagtggatgaagcttgatatgagcatgccgcaaatgaaagtgctgatgcttctgaacaaccacgggacgcttaaggtgagtgacatagcggagaaaatgggcgcttccctttcaaatacgacggggctgcttgaccgtttagaaaaatcaagtttcattacacgcgctccgtcagaagaagaccgccgttcagtcgtcgttcaattaacggaaaacgcgaaagatattttccgcagcctttatcaaaaaggacatgtaaaattgaagcgttcattggaaacactgaccgctgaagaaaaacaaacggtcaatcaagggcttgccattttggcaagagcgcttgattcttccaaacagggatagagatgaaaaaggcctgccggtatcggcggcctttttttgtttgacatttaattcacttgaagtgaataatatattcgaagtgaattaaaaacaggaggattgatcagtatgccggagccattgcaaacagaaaaaaaccagagccgggccatcactctctttacgatcggtgtgttcatggcggcgctggacaacggaattatttccgctgctctgacgacgattaacggctcttttgatgtttctccttcatggggatcgtggggagtgaccctttacacattgggactcagtgtcagtgtgccgattgtcggcaagctgtcggaccgatacgggcggaaaaagctgtttatgattgaagtcgggctgttcggactcggctctttgcttgtcgcactcagtcagagcttccccatgtttttggcggcacggctcattcaggcgcttggcggcggcggaatttttattatcgggagttcgcatgtgctggccgtgcttccgaaggagaaacaagggaaagctctcgggcttttaggggcgatgaacggtatggcggccgtcctcggaccgaatatcgggagctttttgcttgatgtaaccgggtcgtggcattggctgttcttgattaacctgccgattgccgccgctttggttgtgtgcggcggtttgtttatcgctgaaacgaaagagcctgaggcgaaacggcttgacctcgccggcacaatgctgctgtctcttgcgatcttatcttgtatgatcggtatcacgaatctcgatggggcgaagctgtcagaaagcataatggacgtaaaggtatacgggtatcttttgggagctgcacttctctttctggtgctgcttaaggtcgaaaagcgggttgaaaaccgagggggcgatccgattctcgcctactcgctgctgcaaaataaagtgtttcaatggacgctcgtcatcggatttttatcgggagggctgctcgctgcggtcatttttattccttcttatgcggagcaatatttgcacgtatcggcggagaaagcgggttattggatgacgccgctcgcgttggcgtcaggcatcggagcgtggctcggcggggcgatcacggataaaaaaggtccggtcttttccgcggttgtatcaggcgccatcgcatttgcaggcttcagcctgtttccgttatgggtgacggataaatgggaatttgtcacagcgagtgtcattgccgggatcggtttcggatttctgctcggggctccgctgaatgtgcttgtatcagaaacggcgggccaaaacaaaggaacagcgctcggcacgctgtcactcgtaaggcaggtcgggctgacgctcgctccggctttatatgccggcttcattacagcgggctttgaccggatcggagatgacatcaaaaaccgtttagcgaaaagcggcattcccgctgatcaggcgcaaacgccggatatcggcggcggactttcttcgttgcaggagcaagtgagccgaatccccgttcccgctgtcaaaaaagcggtttctgatgcgattgaagcgggcattgccagcggctaccaccatctttatacggcagccgccgtcatttcattatgcacgattgtatctgcggctgttttggcgtttttccgaaagccggcaccctctaagacagatgccagcccatcctccgggaaagctcagtaatatgagcgatgtgatgttcagagtgccagacatatagtccgagcgcttgttccagcgtaatcgtctctttagatacaggatggaagtatgtccgtttgaattgggcttccgtcatggagcgcaaaagagcggcccatcttctgtgcaggatcgttaacagctcaagcgcatccccgcaagcggcggttttggaatcatgaagagcggcccagcctttttcatcataaggacggatttccggttcattctccgttaagctcaatttaaaccgggtatagccgttcatgtggctgtccgccagatggtgaaccacttggcggacagtccatcccccttcgcggtactgcgtatcaagctgactgtccgacatcgctctgacagcttgtttcagtttggccggagcgtgttcgagcgtattgatccattcttgtttctgtccggccgaaatcgattcagccggctgatactctccaatcggatagctgaggatttgtttttccatttttgtctctctcccgttgatcgtattatgaaagtatgatggtgatgtcgcagccttccgctttcgcttcacgaaagacctgaagcacactctcggcgccattttctgtaagctgcttgctttgttcaaactgtctccattctaaaacgagggggtattccacccagccggtcagacaatcccataaagcgtcaaggttttcaccgtagtattcgggaagggcaagttcctttttcaatgtctggtgcaggtcgctcatacttctgatttgctccccattaataactgctttattcatgcgcggctcctttcccatgtttttattctatcagtttaccattttcctcttcagaagtgaccggagtctgccgcggttccagctggacaatgccttgcccgccgtcaacggccaccctgtcccccgttttcagttttgacgttgcatttccgcacccgacaacggcaggaattcccagttcccgggcaacgatcgccgcgtgggacaaaggggcgccgacgtccgttatgatagcagccgctcttggaaaaagcggggtccagcctacattggttgtcgaagtcactaaaatttcccccgccgcaaaagaatccccgtcttccggagcatcaaggacacggacaatgccctccactctcccggccgctcccgcgaaaccttttaaagtatgcgcatcatcagtttccgccggcataaaagcatcgtaataatccgctcttctgtcaggatcttcagcccatttaaacggattgaaccttccgttaataacggatgggaacggcggcagttttttataggtttcatagttttgctttctcgcttgaattgacgcaaccgccggctctttccccgcgagcagatcggttatttcatgcagatacaagaagaaaatatcgtccttcatgccggtcatttccgccgctctgagcgcgaatgctctggctgtccggtacaccctgacaaattcggatctggttgtctctctaatattcgcgtattctgacgctttttccattttggctttgagccatttgaccttatgaggaaacttttcttcaaatcttcggaaggcctgttcatgcgcccgctgctgtttcaaaagcagttgttcggcatcaatacccgactccttgtgttctttgatctgcttcgtcagccaatcccggttttctcccggatgcggtatggaaagttcgtattcatgcgggccacggtggccttggttcctgagatattcttcctcgctcatacggcctttcatgacttgatcaatgccgataatcggctccaggctggccagtccgccttttcccctcagattggacagcaggagattcgcatcttctatccctgcgagttttgttaattgagaggttaacgacgaagaggattgcgcagaatcacgcccgccggatattaacgcaaaccacgcgttgcataaatacggatagatctcattgttccatatcgctaataatgcccgctccgtttcggcccgtttcagcttttcctcaatattccggcaccactccggcgattcgtccaagtaggaggacatgttttttttcgcgagcttcattttcgacagatacggtttcagttttttcgagatgatcttcaaaagttcatactttgagaacggatataaaggaatcttcatttccgccgggatttctcccaatgtatcgctcatcatttttcctatttttccgcctttcggattcagaccgaaagcggcgagaacggaaagaggctggctcatattgttataggctcttccgcaaatattgccggaccagacataatagcccggaatgatgcccgactcttcatccagattccggaggagcgaccatgtcagcggcgtcatcacatcgggaatcgcttctcctatatttgtgtttgtccataaaaaatcaccgctgaaagaatcattccattcataggtttccagatttccggcctgtaaggtcgtaatcgggcgggattgaagaatatacaatgtctcgcccgcggcggcccattcaatatcctgcggccctccaagatctttttccagctttttcgccagtttatagagctttgacgcatatttgcgaaattccccggggccgtcatattttttcttgggccgtgccagtttaaaagaataggcatcggcttccccggaaacgagctgctccccgagaccgtagacgtaattgcctgtcatctcccgcctgctccccgtaatcggatctgcggtaaacagcactccggatatctcagacggtatcatcagctggatgacgattgcgatttcatgctcatcttccattccctgaacggcgctgtacgcttttaccctttctgactgtgccgatcggcggacttcatcaatcgccctggacatgtcttgatctgttttgacattcaacaccgtatcgaattctccggcaaaggaagcctgagctgaatcctcgctcagcgcggatgagcgtacggcaaacaacgcagatgcatggcggctgcggatggatttcacatattgatcaatagcctctctcgcctgatggcgcagctgtccgtcctgaaaggcagacggcaaaatcacaaacccttcaggcacaggatacccgctttgatacattttagagagaatgcttccttttcctcccgcaaaggaataaagttcgtccggaagttctccgaatgttttgacacagtcattcataatgtccccgctcctttttagtcgttcatccaagctcacagtttttctctttttcactttttttgaaagtatttcctataagtatacaatatatcggtcttcacaagggagaaaatcgatggcgttatgttgtcataaatgcatccgtcaaaacggccgcagcggggtcttcagccttacagtgaaagcgctattaaaattagagataggctgcccgatactgcttgcctggcattcgcttccggcttgccgcggggggtttcgtttgcaggttatgtcaacttccgtatcaaaaaggcggccgaaacgccgcctttttttcagactgtgcggccttgatgcgccgccgtatttcttttggtctgcttcggctgatacactttcccgacaaacaggtatccgtatctgaaatggttgcacacccaagataagaaaatgggaccgagcgtgcagatcaaaaataaaagaaggatggcagccgctaaaggcattgatcgcaaatagccttccagaagatatccgctgattaaaaagtaggagtgcagcagatagattgaaaacgaatagttgctgatcatcatcacaatcgcgggcacttttttgagctttgaaaacagatgaaaacacagaaagatcatactgaccgcgtaaatcataatatccggacgcttagaggaaatggagccgccgctgatatatgaaacggccacaatcaatattgccgatacggccgcactgaagtaaaccgcataacggtactgattgatgagcgataaaaaacgcggatattcctttccgcaataaaatgccagacagaaataaaacacccagcccggaaacggaacccaaaagaacggaaaaatagaatcaagccccgatgatgccggcggatgaaagatggaaaagtaagccagatagacggcgttgatgataaacgaaacagacagcacccacatgggagatgtgttgttcagccagcggtgcagcagcatatggagaatgtaaaattgaaagatcacaagaatgaagtagccgatgaagtttcctaaaaacacattctctaaaaatttaccgatcactgaaacgaagccggctccttcttccgccacgcttttcattaaaatggcatccaccgcggcaataaacagaaacggcacgaaaatgactttgccccttttctttaaaaaacccgcgggaacgcctcccgggtatgacctggcaagcagaaattccgaaataaagataaacgccggcgtgctgaacatcaacagggtccgaaaagcatcaaccgtatgggcggcactggctaaggactcttcctgaatcatcagcaccattgaaactacgtgaagcagaaccacacttaaacaggacaggcagcgaatcacgaaaatttcttttatctgcatgcggccgctcctttttcacaagcgcgccggactttagcgtatgcttggcgcagccatttttcccgcagctcgggtgtgctcgttttgacgacagaaaaaaggttccgctcggctttttgaatgccgcaaaattgcagaatgccttttttcagcgtaatccagtccgagtttttccgaaaccactttaagtaccagcccggggaatccgccgtataaaagacctgtgccgtctctgcccggagcagtccttttacgcggccgttttcatatgtgtaggcttctccggcgacaagcactctgtcaaaaaagcctttcataatcgccggaacgcctccccaccacagcgggtagatgaaaatgagatgatccgcttctttcatcagtttccggtatttcttcgtttcagcgtcccggttcatgtcagagcgctttttttcgccgccgtacttcagcacgggatcaaattggtcggcgtataagtcaatgaccgtatagctttggccgctatcctttaaagccatgacgacgtattttacgagagccgcattgaaactgttctcatccgggtttgcatacacaatcaccgtcttcatatgtccctccattatttcttaatttttacaatgattatatcatgttgtcatatgaatgaggcaaagacatgagaaaggctttttccagttctgctgccgtttcgataacccctttctgcatattttcgctgattttgccgccgcagattcaatgacaagcatccggcacttctgcgtttttgagcggccgtatggtatactagctgtcaaatgaatggcttggaggacaacatgagaattttaaagtacgcgattttagggcttttgcgaaaaggcgaattgagcggatatgatatatcgagctattttaaggaagagctcggccagttttggagcgcaaagcacagccagatttatccggaattaaaaaaactgacggctgagggatttattacgtttcgcactgcgattcaaggaacaaagcttgagaaaaaaatgtacacgctgactgacaggggagagctggagcttgctgcttggctgacgaaaaaagacccgattccggaaacggtgaaggatgaatttatgctgaaggcttatttcatctcagctttgacgcaggaagaagcggatgagctattcaccgaccagctcgtaaagcggaaggagaaattgtccgatctggaaaacagttatcaagaactgatgacatcgtccgcggaggcggattctttttcttctcctgatttcggccattatctcgtgctgacaaaagcgcttgagcgggaacggaattatatttcctggcttgaagatattttggctctcatcaaaaaagcataaacaaaacggggcggctctgtatctgcaagccgcctgtttacgttctgagaacttcattgataaacgaatcagccattaaaataagaaaaagcagactgaaatacacaatcgaataaaaaaacatccccttcgaccattgcgtgtcatccgccgcctgaaagcctttgacgctccggtacagccagatggccccgagcaggagagcggacgcggtataaaacgggctgacgtctatataaagaggaacgagcagcgaaaccgcagtcagaacggcaatatagcgcagcatttttatttttgtggcgcggttgccttttaaaatcggcaaaagcggaatgccggcggcacgatactcttcctttcgcctgattccgatcgcccagaaatgcggcggctgccacaaaaacataatcgcgtataacaaaatcgcgggcatatcaatgtacccggtgagcgcgcaataaccgattaaaggcggagccgccccgggaaaactgccgacaaatgtgctccagacggattgtcttttaaaccaaagcgtatacacgacggcatacagcaaaaaggcaagcaggccaagaacggcggtcagtacattaagcgaaacaagcatgatgaatccgcatgcgccgagacatgtgccgtacaggatcatgaccggcggcggtattctccccgtgacgctggcgcgggtgcgggttcgcgccatctttgcgtccatgccgcggtcaaaaaagttattaaaaacagtgcttgatgccatgactaacgccgttccgatcatggcaaccgccatggcggcaaatataccgggccctccgcccgtcctttctgactgaatccatgcgatccaaaatccgcccaatgcggcgagtgaatttgagatgataatccccggtttggcaagaatgataaagtctttgaccgtcatccggtttccgttatgcttcatcggctgttccgtctgtgctgcatttgagttcatttgttcaggttctcctttttcggcttatcatatcaggaagaatcagggagcacaatttattttggacatttttcacacaattgtaaattgtatatgaaaagccgcatcttgtgaccggatgcggcttttgcctttttctattcaaatcctgcccatacagctttttcaatccggcggatgccccgagctcgggccggcgatggcggctccacgcgtcatttttgcgcctcactgagatgttcgctctcttcagtcactcaaaagccgtgtggatattgcaaatcgacgttcttctttcccgagccttttcaagaaaacttcagaaaaataaaaaaccttgccgattagacggcaaggtttgtttcttacagtgtaaatgcgatatccgcccctgatacagggtctttgacgaatacgccctcttctttttcttcgatctcaaagccggcatcggtcagcgcttttgtcacacgtgacagctctttttgatgcggcagcgcggtggtgtaataatccagcccgcttgcatttcccggtttcggcggcgcatgttttccggcccatatattcagaccgatgtgatggtgataccctcccgctgaaacaaacagagcggacatgcccgcgtaattgccgacaatgtcaaaaccgagaatatcggtgtaaaacgctttggcttcctgtaaatccgtcacatgaagatggatgtgaccgattacggttccttctgggagacggcttttccgttcagctccggcttcttccaaaagcccgtccacatcgacgggcgccgtttgcatgacataattgccctctgcatcccggcgccacgtgctgcggggacgatcggcgtatatttcaataccgttgccgtccggatcagacaggtaaagagcctcactgaccgcgtgatccccctgaccgagcgcgatgccgttttcaatcagcctggccaatgcgatgccgagttctttccggtcaggcagaagtatcgcgaaatggtaaaggccggtgacagaccgctccggcagaacgacggcgcttggattttcttcaagcaccagcaggacgcgttttccgtctgctgacagtcttgctgaacgatctgtctgcgagatgacttgaaggccgattacattccggtaaaagccgagcgagcgttccatatttttaatggtcaatttgacataaccgattgccgtatcttgatgaatgccggtcatttgaacgccttctttcttatgctgaaaaagtttctcccttttttgatttgaaaaggagctgatccaatgaaagcagacggcttcctgaaagcgctaagtgaattgacgcaaccagtaagatgaaatcaaattcagatccgcccataaatggtgaggaaagcttcgccgtgaagatggcgccgactaatgtgacggcaaacagaacgccgataatgcgcgttgccaaaccgaaaaagatcagaaccccgccgacaagctcaatcgtcgcgatgacatagaccataaaggccggaatcccgatgctctggaaaaattgcgtagttccttccaacccttgaaacttggataaaccgtgaacaaaaaagataatacctgttacaacccttaaaagcagtgttcctgtttcgaatgatttattcataaaatcctccttgaaaattattatcacttactttatgtaagctagtatatatacataacttatttacgtcaagtaattttgttacatttaacgaaaataacttaaaagtactatttgccttcgcgaaaaaaagacctccgcactctgtcggaggtctttttccctatctatgattcccggaactggctttcatataattcccggtaaaacccgttctggcttagaagttcggcatgggttcctttttcagccatttcgccgtctttcagcacaagaatctgatcggctttttgaattgtgttcagcctgtgagcgatgatgacgcttgttctgcccgtcattaaacggccgagcgcttcttgtattttcacttccgtcactgtgtcaatgttgctcgtcgcttcatccaaaatgagcagcaccgggtccgccagcacagctctcgcgatggaaatgagctgtttttgtccttggctgatgcccgcgccgttttgggtaagaacggtatcatagcctttcgggagccgttcgatgaacccgtgggcattggcggcttttgcggcttcctccacctctttgtcagaagcatccagccggccgtagcggatattctccctgatggtgccctgaaagagaaaagaatcctgcaggacaaaccccatattttttctcagactggatctcgtcagttttttgatgtccgttccgtcaatgaggatttttccgttattcggctcgtaaaaacgggcgatcaggctcgtaacggttgttttacccgctccggtcggtccgacgaaggcgattgactgtcctttcggaacgctgaaggacaggtgttttaagatcgggctgtcttcctgatagccgaaggagacatctcggaattcaatctctcccgttttgatcggctggtacagcgcatgctcttcatcttcccgctcctctttttcatcaagcacgtcaaacacccgttcagccccggcgatggccgataacatcgtattgaactgattggctaaatcatttaaagggcgtgtgaactgccgcgagtattcggcgaatacgacgatggaaccgattgaaatccatcccttcagcgcaaacagcccgccgaccgccgctataatcgtaaagcttaaattgtttaaagagttcatgactttcggaatgaatcccgaaattgtctgcgcccaaaaccccgatgattgtaacgccgcgtttttttctaaaaattgttccatgacgcggtcttccctcgaataggctttaatgaccttcgcccctgatatcgactcttcaataaaaccgttcagctcgccgaggtttttctgctgctgcttaaacagcaaccccgtccggttggtgatccatttaatgctcaaaagcatgatcggaataatcaaaagggtgatcaatgttaaaagcggactcatgtacagcatgacggagattgtgccgacgaatgtaatgacgctcgacagcacttgaatgacggatgtatttaaagtggagctgacattttcgatatcattggtgacccggctcattaagtccccgagccgctgtttatcaaaaaacggaatcggcagctcatgcagatgggtaaacagctcgctccgcattttaaacacggtgctttgcgagatattgatcatccaatagttttgaaaccataaggacaatgattgcacgaggtaaatcccaaacaggatgaacagcacccccgccaatccgtctgtcgtctgtccgacgataaaatgatcaatcgctttcccgatgacgaacggtccgagcaggccgaatatggcgcttatgactaccatgatgatcacaagcgttaaaagcccttttttctcggctacataagaccagattctgcgcagcgtgccttttgtatcttttgctttcgcgcgttttctgccgccttcatttgatttgagcggtattttcggatatcggaaaggtttacgaatgtctttttgcattgtcagctccctcctttccgaattgtgattcataaatctgccggtacagatgagactgtgccatcagctctttgtgcgtgcctttggccagcagttcgccgtcttcaagcaataagatggtgtcagccttcattgcagtcgttattttctgcgtaataatcagtgtcgtgcattcataggatctgatcgcttgtaaaagcttcgcttccgtttgaagatcaagcgcgctcgtactgtcatctaacagcaggagggacggctttctgataaaagcgcgcgcgatggaaatccgctgcttctgcccgcctgacaaattgacgccccgctgtcccagcaccgtgtcgtatccgtttgacagcttcataatcgtgtcatggatttgcgcgtcttgggccgcttccattacttcatctagtgaagcatcctcccgcccccaggcgatattttcacggatggtgcccgaaaacagaagcacttcctgcggaacatagccgatttccctgcgcagcccgcaagcggagaattcaccgatcggtttgccgtctatgaaaatactgcccgaatcagccgtgtacaggcgcggaatcagctgaaaaagcgttgattttcctgaacctgtcgcgcccataatggcaaccgtttctttcgggctggcagaaaaggacacgtgatgcagcgcgtctttttccatgcccggatagcggaaggacacttcgcgaaactcaatcccgcctgcaagcgcccgtgccgggtcctgccccgttccctcgccgccttctgtttccagcacctcgccgattctttctccggaagccttcgcccgggaaaataccatgatgagaaaaggaaggacggacagcgcgcctgtaatccgcgtcgcatagttaatgacggaaacgacatcgccgacctgcgctccgccctgagcaatgcttttggcgccgaaccataagataaacaaaatgcaaatgttcatcagcagcattaaaatcggcatcgccgcttccacgagacgaaaagcggagaccgttttttccatcagcttcgtattcgatttcaaaaaacgtttcacttcgtggtttgcacggaggagcgctttaatcagtttgatcgccgtcaggttttcctgcatgatcgtgttgacctgatcaagccgcttttgcacagaccgaaacagcgcgccgcctcttttcagcacccacagcaaaaacaaaagcaaaatcggcaccgtgatcagcagaaaaaacccgagtttcgcattgacggtcagcgagagaataatgccccccgcgatcattaacggcgcacgaagcataaaccggagactcatgaaaagcatattttggacctgtgtcacatcgtttgtcagccgggtgataaacgatgtggatgagaattgcgcaaacgtcgaataagagaaggattgaattttttgaaaaagcccttttcgcgtatcatacgcatagctctggctgatgtgggcggagtagaatgaatttaaaatgcccgatgcgaatgaaacagcggtcagtccgatcatcacgccgccccacagccaaaccgtaccgagatcctgctttaaaattccttcgtcaatgattttcccgatcagcaggggctgtatcagctctaccgcaagctcgatgagcatgaaaaacagagcgattcccgccaaaagagaatacggttttacatatgataaagcctttgacatgtgtaagcctccaaatcctttgttcaatattattattttatgcctttccggcaaatgaataaagaaatttggtgtgccgttttttcaataatctgcgaaaaagataaaaccttcccgggaagggaaggttttgaccttattgatccaattgctgttcaatacgctcccgcatttgcggaacccctaatccgacaatgacctgaagcgccctgcctttcctgacgacgccgtgggctcccagctctctgaaatcggcgtcacttttgacctttgattcatcagcgacagtgacgcggagacgggtggcgcagttggtgacctccgtaatattgtcctttccgcccagcgcttcaatatacaaagcggctgtatcccgctgtgtttcgtctgccgccgctgtttcttttgaagcctgcttccgttctctgtactcctttttcgaatagagctttgtttcctgcccttcctctttttctctgcccggtgtggcgatgttgaatttgagaatgaggaaacggaagacgaaaaagtaaacagcggtaaaacacaatccgataatgatctggtatacatacgtcaagccgtggcttgacgccagcgggatccagttcaaggtcgcagcttcgatcaaaccgcctcccatatttccgacgacgccggccatatacatgacggttgccatggaagcggcaagcaaagcatgaaccgcaaataaaaacggagagataaaaaggaatgtaaattcaatcggctctgtaattcccgcgacaatggacgtcaaggtgaccgggatcaataggccggcgacgatttttttcttttcctttgaagccgtggcgtaaaaagcgagcgcgattcccggaatgccgaagattttcgagttgccgtgaagcgcgaagcccccctgcgggaacaattctttcagcggtttgacgctttgagagtattccccgagatgctgggcccaataggtgacgataccgccttcagccacagccggaccgtaaataaacggagagtaaataaaatgatgcaggccggtcggaattaaaatccgctccaggaacgtgtaaatccacacgccgatcgccccggaagaaacgagaaagctttgcagcgagcctattccggactgaaccatcggccacacgtatgccaccgcaagtgaaatcggtatcataatgaagaaagaaatgataacgatgtaggaagatccttgaaaaatccccagaaaatccggcagttttttatcaaaataacgattgtgcaaatacacgacaatagatgaaataaagatggcgccgataatattcgtatcaagcgttttgatcccggcgatcatcgtcagcccgctcgttccgcccgcttcctgagtcatatcgacatgaaaagccccgccccaaaccgtcagaatcgcattgataaagtaattgaatgtcagataaactgtaagcgcttccaaacaagcccgcgcctgcgcttttttcgctaaggcgacaggtatgccgatcgcaaacaggagcggcatttggttaaagacggtccagccgccctgttcaatgacgtaccagcattgataccaaagcccgtcaggatcagccaggggccccatcagcgttttatttttaaacagcgtactcagaccgacaataataccggaaaatgcaaataacaaaacaggcacaaacatcgcgctgccgaagcgctggactttttgcatcatttcacgtgacctcccgctatttatcaaaattttcaagctctttataatcaacatatgcacggaataacgcttcgcccaccagaaaaaacggggcgaatgcgacgatttccgttttatcgcttaacgtcaccggcttgctggtcgcataaagattatacggcgtcgtttgcgccagtacgttgtttttcagattggtgattgaaataaacggaactccctttgcggacagggtccttacctgcggaattaattcgggtgtttcgcctgataatgaaataatgatgaatacgtcatcaaccttaaaatcatcacacatgatattaaactctgtgatgtcctgaattaaaatcagatacttccgccgggatacaaacatccgctgcagctcacgggcgcacaccctctgagccgtccccgatccgtaaacgaaaatccgttttgcttcatctatcagccggcacatctccgtcatatcttttgacttcacgtattttacattggcttcaatatcatccagcagcttttcaaacgtcatattctcgccctcttcaggctgatcctcccatttcagaaaaacccggaattcactgtagccgctgaagcccagtttttgggcgagccgcaggatggaagaccgagagacattgcaggctttcgccatgtcattgataccgagatggtagcacgtatgtttatgattcaatatatattttaaaatataaaaatcgttgtcatttaatttcgcgtaatgctgattaaccagttcttcaagactcatcccaaaaatccccccgttttctttctattatatagaataacagataaagaaaacggggaagattgtcatcaggaaataggagacggacttacatcaagctcaggccagtagtccttgttagcctccatcagatcttcaagaatcagtcttgccacacgggcgttcggcactgtttttgacaggatcagcgcctgccacagcttttgaaatgaccgctcttcccacgcttcagccgtcagtttttcaacagacacctgctgttccatcaggcctttttgaaattgcggtatgttcccgactgagagcggttccggtccgtttgagcctacgagacaaggaatctcaaccatggctgacggatcaaagtttgcgatcgcgccgttattttcaacgattaacagcatcctctcccctgtgttgtaagcgatggcccgggcaaggtcgacgatataggaagcatgatcatcaattttaatttcactgttctccgacgattgttcgcgcgtaatcatatcgcattggctgaaaatgaaagcttcccgcccttccatgacttcgttggctctcgtatggttcgggtttgattttttcaccatatcatccgggaataagtaatattgcagatatgtgttcggaagcgtatccggatcagccgcctgtacgtcgcgcgcttttttgaatgtgtcattccagcttgcttcagtctgttcggcctccgtcttcggaacgtagccgtattcacggacatgctctttcagcttcggcattaaatcattgccatgccggtctgtgatggacgtccaccagccaaagtggttcaagccgtagtaacggacgttcatttctttccgtgaagataatccgaggatgttcgccatgcgatcctcaattccgaccggcatgtcgcagatgttcaatatttttgaattcggtctgaggcgccgtgtagcttcggccacaatcgccgccggattggagtaattcagcatccatgcgtcgggcgagtacgtttccatataatcaagaatctccagaacaccgccgatagagcgcatgccgtatgcgattccgcccggcccgcatgtttcctggccgaccacgccgtacttcagcgggatttgttcatcaagcgcgcgcatcgcatattttccgacgcggatatgcgccatgacgaagtcaacatccgtaaaagccgtctctgggtcatcagtcgccagaaattcaatgttcggcgctttttcttttataaatacctcacacgcacccgcaatccgctcctgcctttctttatcattgtcataaagtttcagctttctgatcggaaactcttccaggtgattcaaaagcattaatacaattccgggggtaaatgtgctgccgccgcctgcaataacgattgagaatgatttgtctgtcatgtgaagccctcctctgataacgtttacattttatttatatcatgagaaggtccgatctgtaccgggtttggaggagttagatcatttaatcatttttagttatttttctcaaaaagcgggaaagttcccacaggtacgaaaaaggcctgctgtcatcagcagacccattctcaaaaatgctcttgtaaatcagaaagcagcacttcctgctcaaattgcggatttccgatcggaaaaattctggctgtttccttgtcttcgttgacatgctgaatataaatcggaactccttcgtacgtcacatacgccatggcggcggattccgaaatgtctttcgcacgctgtgtattcacgtctcaaacctcctttaggcctcacacataacgtgtccggcagccaagagaagtatgcttgtttcttacaattgtccggtggtgagtttgaattttttgaggcgtttgtaaaacgtgctccgcgggattccggccattttggcggccagcgtgacattccccttcgctgattcaagggcgtttacgatgatgtttttctgaatgtgctcccggatggagacaggggacgcttcttcctgttcataagactcggccgcctctttaagacctgacgcttcaagcagggctgcgatggggcgttctgacagccgtccgtccgggaacatgacggaaagacgttcaaatacattaaacaattccctgatattccccggccatttccggctctttaataggtctaaaaagtcatcaggaagctccccccgccagccgcgatttcgctgaaattcaaggaagaggccgggaatgtcttcggtgcgttctcttaatggagggaggtggatcggacagacgtgaagccggtaaaataaatcttctctcagctttttgcattcgacaagctgtctcagatcagtgtgggtggcagtgatgattctgatgtcaacgggaatctcttttgtcccgccgaccggggtgactttccgttcctgcagcacccgtaacagagcgacctgcatggagtgtgatatttctccgatttcatcgaggaaaagcgtgcctttatcggctttttgcaaagcgccgttatgtcctttccgtttggccccggtgaaggcgccttccgagtagccgaacagttcgctttcaatcagcttttcggggaccgctccgcaattgacggcgataaacgggccgtttttcctggaactgttgttatgaatcgcccgggcggcaacctcctttcccgtcccggtttctcccgtaagacaaacggttgcgtccgttcgggcgacaagctccagctgctgaagcatatgtcgggatgacgggcttttgcctgccgcaccatggaatataaaagacggcttttcttctcgtttggataaataaacgcatgtgtagccgttctcctcccgcttcgcctgcttgatgtgaaagccctgttcctcaagctcgcgcagcgtatgtccggtaaaatgctgaacgggacggcttgcggcgataacccggctcatttcattgcaaagcacgatcggatcgtgagaccgggtaagcccggcgaacttgctgatcatgtcaagttctgtcattttgatctttagggcaagctcccgttccgccgtataagcgatggaggaggcaattccgagcataaacggctgagcgcgggcggcggggcaggaaatatcaatgacacccgccagccgcccgtcttcataacggatcggcgcggcggaacagctccattgatgagaagcgagcgaataatgttcagagccgtgtatcatgaccggctcttttgtataaagagccgtcccgatcgcattcgtgccgacggccgtttccgtccagcgggcgccttttaagaaattgatgcggttcgcttcatgaatggtgcgcgggtggccgtcaactgaatggacaacgccgtctgaatcaatcaggagaaccatcatttccatttcccgcatcgccgttttcattctttctgcatacggcgttgaggccgctaaaaataacgcatgcttttcggcctgcctttctaaatgatctgccggcattacattcggccccttttcgagataagggttgacgtcggcttttttgcagcggtgccatgaggcggccacccgcttctgaatacgggattcatcaagcacgccttctttcacaaagcgcttccaggttttaaaatcattccgaatgacattcattgtattcgctcccccctgttcagaccatcttttcatatattgtaggggaaaaataaagcgctttcaacgaaaaataccccttctcatctgagaaagggtattccggttatacggaatgcaccgcaagtccggtgacattcagcagggcttcctgaagcgtttctgacagagtcggatgcgccgcgataaagtgctccgacatatccgccgtcatttcaccgttcatcatcatgaccgcctgaccgatcaattccgtcacgtccggcccgatcattgacacgccgacgatttctccgaattccggttcggcaatgattttcattttgccgccatgctgatgtttaattaacgcttttccgttagcagaaaatgagcattctccgattttcacatctccgtatgtctctctcgcctgtgtttccgtcagcccgacagcggccatttccggcgatgtataaatacagcggggcaccgcccgcatattgactttgctgtcctttcccgaggcatgcgcggcggctgtgattccttcatgaatggcggcatgcgcgagctgcattcctccggccgcatcgccgcatgcgtatatatgaggcacattggtctgcatatggtcattgacttcaataccgcgcggagaataccggatgccggcctgctccagattcaggccttgcaaacgcggttttctcccgattgcaaccaaaatgtgatcagcctgagcctcaatttctttgccgtcttttgtccacacggcggttttcctttctttgtcaatccgctgaagggcggctttcgtctgaatatcagccccgctgtctcttaaagagtcttcgaaaacggcggcgatttctccgtcttctgccgggagcagccggtcagccgattcaatcaccgtcactttcgttttaaaccggctgaataaagaggcaaattcacagccgatcacacctcccccgacaataagcagagaagaaggaatttgctgtaaagaaagcgcgtctttgctgtcgatcacccaatcgccgtcaaatggggcaaacggcagctccgccggttcagatccggatgcaatcaatatccgatccgcttccagaatgtcttttgcgcctccttctccttcaacaagcaatgtctgctctgtgagaaatgaagctgtcccgctgatgactttaatctgatttgctttcattaagtattgaattccctgcacgagccggctgacgatttgccgtttgcgcccctgcatgcgggcccaattgagtgtaatgttttgcggcagttcgatgccgaatgtatctgcatgcctgattttatcgagcacattcgcgctttccaaaagcgactttgtcgggatgcacccctcattgagacaagtgcctccgagcggccctttgtcgatcagaacgacttcttctcccctccgcgcggcagtcacggcagctgcatatccggcaggcccgccgccgataatggctagtgtcaatctcttcaccctctctataaaatcaatccggccggctcttcaagcagcgctttgaccgttttcaggaagtccgctgccggtgcgccgtcacatactctgtggtcaaaggtaaggctcagcggcagcatggtgcttttgaccagctcatctcctttaaacgcaggcgtttcatagcttgcgcctactccgagaataccggcttcaggcggattaagaatcggggtgaaatgctcaattccgtaacccccgagatttgtaatagaaaatgtcgatccgtgcaggtcatctccggaagcattgccttcccgcgcccggcgtgccgatgtgctgatgtgatccgcaagctcaaggaatgaaagcttttccgcatcccgaatcaccggcacgacgagaccgttttcaagagaaaccgccatcccgaggtggacatatggataggtgatgatccgctcctcttgataagagctgttcagctcaggatgctgtttcagcgcaagcaccgcggcccgggatacgaaatgtgtgaccgtcagtttaacatcgctccgctttttcgcgctgtcggcgagctgctgctgccattttacaagctccgtaatgtccgctttcatagtcagcgtcagctgggcgctgttttgcaggcttttgtgcattcggtctgcaattacttttctcatcgctgaagccggttttccctccggctgtgccgtctgaaccgaagactgcggttctgattccgtcttcatggccttgatgacgtcagcttttacgattctgcctccgggccccgtcccgttcagcgtttcaactttcaacccggctttctccgccatttttcgggcaacgggagatattttcacgcggtgtttacgcttttgcacggctttgggagcgggaatatgttcaggttcagattgcggtttccctgcattttcaggagccggcgcctccttctcccgcacttcttcgccgttttccccgatataacagatgggcgttcccggcgggactccttctccctctttgactttaatatggagaagcgtgccgctttcaggcgcttctatttccatttctattttttccgagttgatgctggcgatgctttctcccttttcaaccgggtcgccgacttttttattccagacggatacttcacctttcttcatcgccattcccagcttcggcattactacttttacagccattctatatccctcctttaattcattgccggctcgccaagcaattcaagcgtgacgctgacaatttggtctggtgtcggcaaatattgatcttcaagcaccggcgaaaacggcactggtgtatgcggcgctgtaatccgtttaatcggtgcatcaagcaaatcaaagcccttatcggcgacaatcgcagcaatatccgtggcgatgctgcagcgcggattggcttcgtcaatgatgatcagccggtttgttttttctaacgatgtgaaaatcgcttcctcatctaaaggagacagactccggggatcaagcacctcggcgtcgatgcctttctcagaaagctgcgcagccgcttcaagcgcagtattgacctgcttgccgaccgcaaagagcgtgatgtcgctgccttcgcgtttgatatccgcctttccgagcggaattgtataataatcttccggcacctcgcccttcatgttgtaggacgttttatcttcaaaaaagaataccggatcattgtcttctattgccgaaagcagcaaacctttggcgtcatatggattggacggcacaaccgtcttcagacccgggatgctggtgaacaggccatacagcgcctgcgaatgctgagcggctgcccggaatccggctccgtatgtggtgcggacggtgatcggcacttgcgctttaccgccgaacatatagcggaatttcgccccttggttgatcacttggtcaaagcacgttccgataaaatcgttaaacatcagttccgcaatcggtctcagccccgtggatgccgcagccatggccgcacccatgtagcccgcctcagaaattggtgtgtccagcaccctgcttctgccgaattcctgtacgagcccctttgtgacccccagtacaccgccccatgcttcatcatcttgcaagtgatcgaccgccgctcccccggcgacatcttcaccgattacaagcacattgtcgtcttttctcatcgcaagcttcattgcttcattgatcgcgtccgacatgcttatgactctcgccatctcacattccccctttttcatatgacacgtagacgtctgtcaacagctcagactctttcggatatggactcttttcgctgaacgagacggctttttcaatcgattcgctgacacgctgttcgatgtctgacagtttatttgcatctgtttcttttagaagatagtttttaaagccttggatggcatccttttcttcaagatgctcagtcttttcatcctttgttttataagtttgggcatccccttcgaaatgtccgtagtttctgtaagtcatacattcaatcaaagacgggcctccgccgtttcttgctctttctatcgcttccccggctgcctgataaactgctaaaatatcttttccgtccaccgtgacccccggcatattgtaggcagccgcccgatcggcgattgaatcacaggctgacgcgtactcaaatgtcgtggcttcgccgtagccgttgttttcggcgatgaacacgacaggaaggttccatactgccgctaagttcagcccttcatggaaagtcccttggttattggctccgtccccaaaaaagcaaacgcttacatttttagtttgtttatatttagccgtgagcgctgatccgcatgcgagcgtgaatccgcccccgacgattccatttgcgcctaacatgcctttatcaagatccgcaatgtgcatagaaccgcctttgcctttacacagtccggtcgcttttccgaatatttccgccatcatgccgtccagatcacagcctttggcgatacaatggccatgtcccctgtgtgtgcttgtaatgctgtcgccatcatctaaatgagcgcacacccccgcagctaccgcttcttcaccggcatacaaatggacgaatccgggaagcactccttgcgcgaacagttcatgcactttgtcttcaaagcccctgatttccagcatcttttggtacatccacagcgctttctcctcagttaatgacaagccttctcgttttaacaattccattttgtgcgcctccttctatttagggttcacacttataaatgcaagaagcatgccagcctttgaagcccgtaaaatgaatgtttttatttttacaatggagacagtttgagacaggtgtctcattttgtctcaatctgttccctttgtctcgttttaaagcatacaaaaaagaccgggcatcaccctgtctttgacaatgatcgacgtatttatttcctcggaaatcttttaactgcttcattcttctgcatacagtctatcgtggcgtttgagtggttacactcttttttttcatatccacgtgctgcagttcatgcttttcttcaacagcccgattcagcgcttgaagcatgtagccaatgcctttatacgatgacaaaggccaggtgatatgctgatgctctctgatgacggcgtttaggacgcttcggtattttttcccgccaagcatgacaagctcttcgatgtcggaaaagcctttttcatgaaattgacggcgcagctcgtccgctgccatgatctccggatgaccggttccaaaagtgacatcgtaatttccgggaaccatatcatccggacgaaggaatccgtgctttgccgacaaaattacccactcatcgaaaaatgctttcgcataacgctcgcacgcctgatgaaacgggctgagataagcgtcttccgcccttaccggacctgtatctgaatggacatcccaaatttttttcttgccgcaggggatgatgcacagtcgtttcatttttctctccccctttatgatgtatctcctatcaatgtaccatgattcgtttatttctgcatgacgaaactggccatggatctgtctgggtaaaaactgcacacaaaaagacccggaattcaaaccgaaatccgggccggatgaagaggtatttatgtcactcttgctccatcccatcaagatactttctctcaaagtcatcgagcaatgcacgcacttcatctgttgactttgtattcatgcattgatttcttaattcacttgctccacggaatccgcggagatatatcttgaaaaagcgagggagcggtttatatgctcgagcttctgcttttgaatattcatcatgaagatccaggtgcaatctcaaaagatcaagcaattccttactgctatgctctctcggctccttttcaaaggcgaatggattagtaaaaatgcctcgtccaatcataatcccgtcaacaccgtattgttcagcgagtttcaagccggtttcacggtcaggaatatccccattgatcgtcaatagggtatccggcgctatctcatcacgaagtttcttgatttccgggatgagctcccaatgcgcatctactttactcatttccgctcttgtacgcagatgaatggaaagattcgcaatgtcttgtttcagtatgtgtgtcagccagccgcgccattcgtctatatccgtgtagccaagtctggtcttcacacttaccggcagacctcctgctttcgccgcctgtattaattcggctgcaacttcaggacggcaaatcaggccgcttccctttccattccccgccacattaggtacaggacagcccatattgatatccaggcccttaaaccctaattccgccatcccaatactcatttggcgaaagttttcaggcttatctccccatatgtgggcaaccatcggctgttcatcctccgtgaaagtcaaacggccgcgcacactatccttcccatccgggtgacaatagctttctgagtttgtaaactctgtgaaaaacacatcaggtctgcctgcttcactcacaacatggcgaaaaacgacatccgtcacatcttccattggtgccagtacaaaaaatggccgcggtaattcacgccagaaattatctgtcataacaaatccaaatcctttcatgatgggatacagccaaaccttgatcccaaaattaaaaactgaccatgcttcttttacacttatagcatgtgtcagcacttcttatcaaacgatagtaaattttgaacatttcactttttacacgtaaaaaagtgaaaaagcaaactgaagcagaacgccttaattgagttaacgtaatagactatcgctatagttaaccccatatcgttcatttctgatcaactcagccaactccttaacctttaaaagggtttgagagagaaaaaagtgtgatgattatctacacctattttttatttatattgtggtttattaatagtagcgctgaccttcatttttcttagcggccttacttttgctctttttgaacaaaaaggattccaacctaaatagaatatcatatgagttctccctattaccaatgcaaaataattgtcctgttatcgaagagaaaatatttaacgctgcaccatatccgtatctcaatatcatttgcgaaaaaataatttgattaaacaaatggggctgggggtggtatatctgggtactcaagagaatgtaaatagaaaaagccttaacttaccgcttgtgaatcacatggagtaaagaggatgggatgggatgggaagagaaaataaactcgaacttaacagaattcaagaacttcaatctggatcttttggatttgctcatggtttagaaataaccaacgcaacaagtggcttctgtctctatacagtatatgtactaagggtcgattggctttcaaaccccatatgttaatatctttatacaatcacctatatatgtttgtataaggttacgattcagtaatcctgatccaaaaccaataaaatagactgctgactaagtgccgcagtcttcattcataagattaataagaaagtgttcattttctttcatcattaaataaggcatcagaagttattgctttcatttcgaatatcctttgttatacctgtgatgatttgtataacagtgaaaacccccaagaaaacagtgacaatattaaaccatggattatcatagaatgaaagatatgtttgaaagaaatccagttcagctatgtttgctgggaatccattcatttctctataattaggaccccatccggttaattctgcaaaattaaaataaagctgtgaaactaaaaatgccaaaaccgtgagaaaccaactttttttatacaacggccgttttttgtttactttatccatttcattatccatttccttttctgcaatactttttagccaagtgacaatctaacatcattatagtatgaagcatgattgtcgcgataattacttattaaggatataaccatcgcaggtattactgtaatagttgttatcacttgtgtttccgcctcgggtttattccttctttgggaataaggaaaataatcggggtccttttttcctgtttaggctttcatatcatgtataacgaccaaacatgcttttttagtgtgtttgatcttttatccacagttgttgctaatagtagatgtgccaactgccgttgtgattagtgtaagtaagcaaccttgccttttacagcttctgcttcagaaccttcgttcagtggttgaggttccaatatctctcattcggtttcaccttctttttatcatttattacaactatcgccaatagtagatgtgccgatgagtgtcggggactttattctttaagaaagaagtttacaaaatattaactaaaattacaagtattcacggaacttgaacgacttgttattgcttctggttcacaacaagatcttcatattttgtctgtaatgccgtttccaaacgaaaaaaagaaagtgttaatagaaagcagcctacttggctgtttttcacttgcttttccatacgtttttttcaactctttttatcagttaaataaagacaaaagacagataggacaagggcaaaacatgaaaaaacccggaaatcggaattgtttaatttaccgaaatccaggtctgattacgaattgtttattttagttagacgattttaatacaagcttcgccacggcttccacatgagccgtctgcggaaacatatcaacaggctgaatatattcgacgcgatagtccttcgacagcgtctgcaagtctttcgccagtgtggaaggattgcaggatacgtagacgaagcgtttcggttttacttttttgatggtatctaaaaatgttctgtcacagccggttctcggcgggtcgacgatgaccacgtcagggcggaagccttctttcgtccatttcgggagccagtgttcggcagttcctgtgacatatgctgcgtttttgatgccgtgttttttggcgtttttcttcgcatcgtcaattgattctttaatgacgtccatgccgcggatctcttttgcgccgcttgaaacccacatgccgatcgtaccgacgccgcaatacgcgtctacgactttttcttttcctgtcagctgagccgcttgtttcacttcgtcatacagcttgaccgtctgctcagggttgagctggaagaaggcgcgggcgctcagttcaaatgacacgtcaccgagcacttcttgaatggcatggcttccggccaacgcttttgttttgtcaccgaaaatgacggatgtgcgcgcgccgttgacgttttgaataatcgatttcacttccggcagacggttctgaatggctttgacgatttcgtctttattcggcagtgtctctttcgcggtgacaagcacgacctgcacttcgcctgtttcaaaaccgactctcgtcacgatggtgcggacatcgccttttttggtccgttcgttataaacggatacgttgtgtttttccaaaatacggcaggcgatacccgttgttttgtttgtcgccggatgctggacaatgcattccttaatcggaacgattttatgggaatcaagtccgtataagccggcaatgatgctgccgctttgcgagcgtccgacttggaactggcttttgttccggtaattccaagggttgtccattccgatcgtatctttaatgttcatttcttcgacattgaatctcgtatgacgttccagagactgaatgacgatgtcgcgtttttcgcgaagctgctgagtgtatgccagatgctgaagctgacagccgccgcactggtcgtagaccgggcatggcggcgtgacgcggtgttcagacggcttgcggatttttttgacgcgtgcttctgaaaatttcggctgcacatttgtcgcttcggcaacgacttcttccccgggcagagcgccgggaacgaagacaacttttttcttaaaatagccgacgccctctccgttaatgccgagacgtttgatggtcagcggaaatgtctgcccgattttcaattcggcaggcgcctttttttgatgttgattcacgtttttttctctccgtttctatataaagcctttctcctgggaaagcggctgatttgaaatatcacatcttttcagtataacatgcagccggcggttccttcatgtttttcactggaagtttccaaaaagctcatcattcaatacttctccacaaatataaggacgcatagcttaaatacggcgcccattcgctgcttacctggagcatcacgtcttttgacggtttatcctcaagggcgaagcggcgtttgacggcgttttgcaggccgatgtccgccaaaggaaacagattcgggcggccgaggccgaacatgaggacgttttggacggtccacgggccgatgcctctgatggcgatcagctttttcataatgtcttcatccgataaatgggtaagttccgccagattgagcgctccttctgcaatcatccgtgaaatgtcaatcgcatattccgcttttctcatgctgaactggagctcccgcaagtcctgatactcaagccccgcgatcgttttcggctcgggatagcaccagacgccgtctttttgttcaccgaaggcatggacgaaccgttccgttaaagtaaaagcgaaggacaggttgagctgctggtggatgatgcatttcatgagacagttgtagacgtcatattccaagacgagcggggttcccgcatgctcctcaaaaagcgccgacagatttgtttttgagaaatgatcaagcacaggctgaagcggctgctcccactgaaaaatgtgtttgatccgttcaatcatctcctcgcggtccgtttctccgctgacgagaaagaccgggtctgcggcggtgccttccgcttgaaccgtgatgacggacagtttgccgtcccgtgttctgagcggcactttgattgatcttgcatgaagatcgaccgcattcagcggatcgagcgacagcctttcaaggactttatcaaaatgatacggcggtgtgaccgaaaccgtttccttccacatatgctccacccctttttgtccaagtatatcatgaagcggccgggcggcaattcgtatacttttcttcataacgccgcatgatataatggcaggcggagggttgtttatgatacatataaccgcaatcacaacacataatgagatattagataatatccccctatcacgtacagaacaaccggacatcgcatggtactggattgattttttcggcgctgagatgcatgaaaccgagctgctgcgtgattattttcactttcatccgcttgcgatcgaggattgctttcagcatatgcagcggccgaaaatcgaccattatgacggctaccgtttttatgtgctccacgctctgaacccggacacactggaaatggaagaggtggacatttttcagtccgaccgtttcatcgtcagcttccatttgcacgaatcgcccggcgtctcaaaggtgagagaacggtttttcgcttctccgggattagccaaaaaagggcccgggcacatcacttatatgattatggatcagcttgtcgatgaatatttccccgtgctgtacaaaattgaagaccggctgaatgaaattgaagacagcagaacccataaatcttacggcactttaatgaatgaagtgtttgaattgcggactgatcttttgaacctgaggcggacgatcattccgatgcgcgatttaatgtaccggattttgagccttgaccatgtaaaagaaagccgtgaaacgaaagcgtatttcagcgatatttatgaccacctgttaaaactggctgagctgatcgagtcaaaccgtgatatgacgtcagatttgcgggacagctatgtgacgctgaattcaaaccggatgaacgccattatgatgacattaaccatcgtctcgaccatttttatcccgctgacgttcatcgcgggggtttacggcatgaatttcgataacatgcctgagcttcattggaaatacgggtattttatcgttttgggcgtaatggccgttcttgtggccgccatgctgttttggttcgcccgcaaaggctggtttaatattttcaagtaagaacggctgccggctgttcttttttttgagaaaacatgatagtctggaaaaaaacgtaaagaggtgtgcgccgttaccatcctttctcacaaaatcatttcttctgtcctcctggctttcagtgtcatgtccattgccccgctgtataacggccgtacggtgtctgattacatctttgagtcgctcggcttttcctcttggctggaagatggagcccatatctccgtcattcccggggtcgtgctttactttgcggcgttaatctggtgtgccgccgcgttcaggcggacgcttcccgcggcggggctgtttctgatctttctcagtatgggggccgcttccggtatcagtcctgccaccgaatatgccgttttttccttaaaacagttcgcgcccgaaaaagaggctgtcgagtatttgaagcaccgcagcgaatgcagtcatctggttgagcgaaaaagagcgggcatgagctgcacgctttatatcaatcattacggaaaaggggaacaaaccatttctgtcaccccggatttatcagaaaacataaaggacgtcacattcaaatcaaaaacgttcactgtaaaaccccgttcaaaaacaatcatcaaaacccgatttaccggattttataaggggaaagccgcctcagactccggatggtcttcagaacctgaactgaaagtggcaatcctgtacacagcagattaaccattttgcatgtataatggtggaaaacttttcattggagggactgtcaaatgaagatcgccatcgtcggactcggcaatatgggccgccccatcgccgaaaatatcatgaaagccggatacagtctgactgtatataaccggacgaaagaaaaagcggctgacctgctggataaaggggcagaatatgccgaaacgccccgacaggcagctgaacatgcggacatcgtgctgtccatgctgtcagacgatgacgccgtaatagacgtaacgttcggagcttgcggcattattgccgggttatctgaaaacggcattcatatttcaatgagcacgatcagtacggcgctgtcagaacagctttccgccgcacattcgggcagagggcagtcctttattgccgctcccgtcctcggccgccccgatgccgccgagaaggccgagcttcgcatcatcacagccggaccggcggaagcgaagaaaaaggccgaaccgctgcttaacatcctgagtcagcaagtatttgacactggtgaagaaacaaaaacggccaacgccgcgaaaatcagcgtcaatttcttgctcgtgtccatgcttgaggcgttatctgaatcgttcttaatgatggagaagtacgggttagagcaaaaacaatttttagaaatcgccggcgcgctctttggctctcccgtctatcaaaattacggcacgatcatggctgaggagaaatttgagccggccggtttcaaaatgtctttagggctgaaggataccaatctggcgctcgccgccgcagaacaggtttccgcaaaactccctcttgccgaactggccaagagccattttgaaagcgggatcgcacaaggcttcggggatctggattgggccgctttgattaaatgcctgaaataacaaaacacctctccattaccaggagaggtgttttctacaggcgcggcagcttcatttctttctcaaacatcaggtcatcaatgcttttaaacgtgtagccttcttttttcaaatcggtaatggcatcgtccagagcttctgaattgtcctttgaaacggtgtggagaaggtagatcgcgccgggatgagcctgctttatcatgtgatcataggcgtattgtttccctttttgctcgttaaccttccagtcgacaaatgcgacggaccagaaaacggtttggtagccgaggcgcttcgtttctttgaggacatattcgctgaatacgccgcgcggcggacggagatacaggttgtcccgttttccggtaatgttgtacacagcttccgtgacggaatcgagttcgtcttgaatctgatcgcccgtttttgtcgtcagatcaggatgatgaaaagaatgattgccgatgatatggccttcctttgacatccgtttaatcaaatcaggctgctctttcacaaaatgacccgtgacaaaaaaagtgcccgtgacgtgatgtttttttaacacatcaagcactttcggggtgtacccattttcatatccgttatcaaacgttaaatagatggtcttttctttcgtattgcccaaataaaaggcatcatattttttgaccagattgtccagctgtctgccggcatccggcggctgatgattgacgctgcgtttaaagccccagtttatccgttcattcggcacggcttctgcgctgttgatgcctcccgcaagtaaaacagccatgcagcaaattgaacaaaaccatttcatgaccagcactccttctgcatttttccttattttgcagtaggccctgcccttttatacagccgcattatggaaaaagaaaaaccccggcatccgccggggtttattcccaatcctttttaaagcgttcgtattttgcttccagatcatcaagcatgccgatgagccggtctatatcttcaacgtccgttgattcagggtctaatgaatcaatgacattcataaacatatcgagtctgttcttcaggtaatcgagctgctgatctttgctgtttactgcattccccatacttccactccattcattttttataatggtagcgtattttttgccgtttttcaatggttccgctacttgcgatcttggcagatcaggtctaaaattaacagttggcagacgttagtatgccccatttataaaggagttagatagtcatgacacaaaacacaacactgcgtccgatcacaccggagtacgatccttgggaagcgtacatggatgtcgaccagtatggagatatgaaactgacgaacgttgaattcacaacgacgactttgtgcaatatgagatgcgagcactgcgccgtcgggtacacgctccagccgaaagacccgaatgcgctgccgatcgaccttttattaaagcggcttgatgaaattcctctgttacgctctatcagcattacgggcggcgaaccgatgctttcgctgaaatcggtaaaggaatacgtcgtcccgcttttgaaatatgcccatgaacgcggcgtgcgcacacagatcaattcaaacctgacgcttgatatcgggcgctacgaacggattattccttatttggacgtccttcacatttctcacaactggggaacggtcgaggactttgccgacatcggatttgcaatgatggagaagaaaccgacatttgaacagcgggcgcgctattttgacaaaatgattgaaaacagccgcacgctggtcgaagcaggcgtaatggtttcagcggaaacgatgctgaacaaacggacgctgccgcatattgaacatattcatcggcaaattaccgaagaaatgaaatgccagcggcacgaagtccatccgatgtatccgagtgatttcgccagcgcgcttgaatcactcagtctgaaggacatgagacaggccattcatcatctgctcgacattcgcgatgaagagacatggatgctgttcggtacgctcccgttttacgcatgcagccctgatgaagaagaccagaagctcctccgccgcctgcgggaagcgaaaaacgttacggtgcgaaacgaccctgacggccgctcccgcctgaatgtcaacatttttgacggaaatatcattgtcacggatttcggcgatacaccgccgctcggcaatattaaaacagacagccttcccgaagcatatgacaagtggagacagacgaagctgagcaaagagctgaactgccgctgcacaaacgtccggtgcctcggcccgaacgtccttgtcaaaaacagttattatcaggacacagatttttcattacgaaaagccagaggttaacaaaagatggaaacgacaattacggacattttgaaaagcaaagtggttgagatcatcatcgtcgctctcgtgctttacgccggtgtttttctgatcaaccgctttgtccaggtgttatttaaacgcacggatttcttggaggaacggaaagggaaaacgattgaaagcctcgtccgatccatcacccagtatacggcgacgatcggttttatcttttacgtcatttctttattcgttcatgatttcggccgaattttagccggggcgggtgttgccggtatcgtcatcggtttcggcgcccagtcgttaatcaaggacatattggccggtgtctttttaatatacgaacgccagcttcataaaggtgattacgtgacgattaacaatctgttcaacggcacagtcgaagaaatcggactccgttccctccagatccgtgagtggaccggcaagctgcttaccatatctaacggtgaggtcagacagcttcaaaactataacattgattttatgcggattaccgagtccgtcgtgatcagttacaaggaagatcccgagcgggtatacgccgtgttagaaaaagcctgcgacatgctcaatgatgagcttcgcgattcactgaagcgggatgaatttctcaatgcgacggagccgtttcaagtgcatggaattatgagtctgaacaaattaaccagaggcattgaatttacagtgaaaggcatggttcaagacacagaatacttctcggcgagccttgcggtgagacgcgttcttgcccgggagctgtacaacaacaatgtgcaattgctcgaggaaatgtatcacacacaaaaaagctgattcccgaaccggaatcagctttttttatttatctcggctgcgctgtcatttgaaaaccgaatgtgacgtgatcctgcaccggaatccaagccccgattccttgcgaagtcacatttttgacgacaagtttccgcttgctgcctttcagcaccaaatacacttcaccgtatgttacttttcctttttcattaacggccggagcgtaggcgtgcaggtagccgagccgctgcggagaaattttgtaggtttgatcgcgttttgtgcctgcgccgataaccgtttcaaatgcgagcggcagttttgttttcttcatcgctttttgcatcatcatgctttttacgtcttctgcgttcggcaccttcgctgtgagcccgcctttgattttgtattgctgttcttgggcgtatgagataaccgcggtttgctgtccgccccggttatccgctctgttcgtattgatttttttatattcccagttggcgaccgtttcgttcgattgatagccgagcgcccatttcccgagaaatattgtcgcccggtatccgatggcaagcggtgaaccggaaaccgaggattcattcagcatctttatcagatgcggattttcgatgttgatctctgatgtatctaacaattccttcgccagtttgctcggctgaagcatcggctggtcctgtgaagcattcggatacgtattttcctttgaaatgcttacgacagagttgggaactttaaacggtttttttgcaccggcagacggcgttgcgaaaaaactaaaggataacagcagaatcagtgtggcatgaaacagctttctcatcatatcactctttctatagcattttcctttagtcttttcctccgcaatcgttgttatccgcattttttacaggttaaagcaggaaaaaaccgatcgccataatgacataagcggcaaggagcgtagccccttcaaaccagttcgaatcaccgtcatttgaaatcattgtcatcaaaaggacggatgagatcatcgcgacaagctcgggcaatgtgaatacaagcggcatattgaccggaaaaaagatggaacagatcacaagaaccggagccacaaacatggcgatctgcaaagtcgagcctaccgcgatttcaacggcgacatccatcttgtctttgtacgccataataatcgccgacgcatgctctgcggcatttccgacgattgcgacgataatcactccgataaacagctcgctccagccgaactgttcagccaccgcatgaaacgtatggacaaggttttcagatatgtaggcgacgataatggttgaaataaataagacggctgtcgctcttttccccgaccactcaggctgctcctcttcttcctttgcctccggctgattcggctgataaacaccgcggtgggtgacgagcttgaaataaagagctgccacgtacaaaaggatcatgatgatgctgatgccgacactcaaatcaagcttgtttttttcccccatatccatggaaaacacttcgggaatgacaaaagcaacgataatggcaaaaatcagcaggcctgaattatgccgtgcatcatgaatattgaattcctgccgcttgtatttcaaaccgccgataaaaaacgacagtcccgcgacgagcaaaagattgccgagcaccgaaccggtcagtgaagcaagcacgatgcccgttagcccttcttttaaggcgaaaagcgatataatcagctctaccgcattgccgaacgtggcattcagcagaccgccgatccgcggtcccgcgataatggcaagagattcagtcgctctccccatataacttgcaagcgcaataatcgtcaagcaataaataataaacaaaaccgctgacggccagtgcatcaggccgccgatgactgaaagcggcactcccgccgcagccgtaaagaaaaaaatccgattcatatctgcctggctccttttttcgaatgagtctttttatatccttctcaaaaactccctcaattacacttccgcggcagcccgaattggcattttcaggttgccggacgcgacaaatccgtgtacgatcaagaaagatactgacgaaggagaaaatacgcgatgtcacgactgtacttctttattttggttctgcttgtttccatctccggattttcccaaggcatgcttctgccggtgatctccgtcatttttgaaacgaacggggaatcagccgctataaacggacttcacgcaaccggcctttatatcggcgtgcttctggcgtcgccgtttatggaggccccgctgcgcaagctcggattcaaacctctgatggtcatgggcggatttcttgttatcatcagcttattcagttttatttggcttcaatccatatggttatggttttttcttcggctgcttatcggaatcggggatcatatgctgcatttttcaacccaaacgtgggtgacgtcaaagtcaacgccccgaaacagaggaagaaacatttcgctgtacggactgtccttcgggctcggattcgctgtcggcccgttcatggtccctcttgtgaaaacaagtccgtcccttccgtttatcgtatccggctgtatcagtcttgccgcctggctgtttgtatttgtcttacgtaacgagtacccggcgcaaggtccggatgaaacatccggggacaacagcgcaaaacggttttaccgcgcccttcttttcggctgggtcgcttttctcccggctttcgggtacggttttttagaaacggcgctgaacggaagctttcccgtgtacgccctgcgcttaggtatatccgtcgatgccgtcgcgctgatattgcccgcttttgccatcggaagtattgtattccagttccctctcggtttattaagcgatcgattcgggagaaaacgtgtcctgctcgtcatcttattaacgggtgccctttgctttttgacggccggactgtttccgtcgccttctgtcatcggctgctgctttttcacggcgggaatggcggtcggcagtatgttttccctcggcatcagctatatgagcgacctgctgccgtcccatctgctgcctgcgggcaatctgctctgcggcatttccttcagcctcggcagtatgatcggcccggtggcgggcggctggtatatgcagcggtttgaaaacgccaatttgttttactttattacggtgattctggtctgtatttggcttgcgctcgtcttcgggaaaacaaagcacagtcccgcatccgaatcccattcttttccggcctcataaaaaagccgcctgatctaagtcaggcggcttctttctagtggtatccgttctgcccgttagcgcttccgcttgttttattcttcgggccgtttttggagttttgtttattatggcttccgccttttttcgtatgcttggtcataatcgattcccctccgtttttcagcttgaacgtcatccgttcctctatagcttgctcccgcggtacggattttcatcaggaagctttttacgtttatgtaaaagcgcgttgatttctcctcctaaaatcagcagtgttcccgtaaggtaaaaccagatcataaggacgataattcccccgatgctcccgtatgtggcgctgtagttggcaaaggtgccgacgtaaaatgagaacagcatactgacgataatccagcctgctgccgcaaatacggctcccggcagcacaaaacggagggaaagccttttattcggcgcgaaaatgtaaagcgcggtaaacacgattaaaaggataagcggactgataccccagcggacaaccgaccacacctgcaaaaacaggccggaggcgccgatgaaatctgcggcaagcattccgatttctctgccgaacaccggcagaagcaatgcgattaaaatcgtaaccaccatcgcgatggttaaaaaaattgaggtcaggcgaataatgataaatgagcggttttcctcgacttcgtaggcatggttaaatgctctgacaatcgcgttcataccattcgaagccgaccagatgacggcgataatcccgaatgacaaaagcccgccgctgcgcttgttcagcgtttgctccgttatggatttcaccatagacatggcactgtcgggcgcgtattgatcgaccgccccgagcacgtcttctgccgatatgggaagataggcggtgagcgtcagcatgaaaatcatcaacggaaacaatgacagcaggaaaaaatacgccagctccgccgatttactttgtccttcatggagagaaaaccttgcaaacagctcctttataaaactcatgacatcccacctcaatgatcgtttttcgaaaaatgctccttcgtttcttttaacaggtcaatgacctgcggcgtcgtctgcttcagcttggtgatctgcccgtttaaaaaactcagatcttccgatacggtattggcgatgattttcacttgatcaagttttgcagaagcctgctgtttcagggcttcaggatgttttcgataaaatgccgcacgccgcctgcacgcgtccatgttccggaaacatgcctctctcgtcggcttatgtaataaggacagtgctccgccggcggcagcgccgatcagaatcgcttttgccatgatgcgtgtctgcttcatcggtcaatcccccttataaatgatggtctttctttattgtctccagcaaatgacggcacccggactcgaccaaagcgtacacctcgctgaaattcccggtataatacggatcgggcacgtccgcaaggtccgactccggtacataatcaagcagccttgcaatacgcggcgccgcttttttataaccggccatgctgcgcagatgtccgatattttctgcatccatcgcaatgacgtaatcaaaatcggtcagatcagactcacgcacctgcctcgccgtgatgccgcttacgctgatccctttcttctttaggatctcctttgtcccttcatgcggcggatttcccgcatgccaggcgccgattcccgctgaatcaatgttaatctgcccgttcagcccgtttttcttcaccatatcagaaaataccgcctctgccataggcgaccggcaaatatttccaagacagacaaacagcacatgtatcatatcgataacctccctattctttccccgcattttgaggatcaaaaaccttatcatcatcttagcaacttttctgctgctgtggaaataagcttttattctaaatgaattctgttagaataaagggtacgaaaacggtcatgaaaggatgcatgaatttgccgagccaacaaacagaaacgttaaacaaaatgattgaagacatttcgcaaaagctcaacatgctcaatgtcggcgtcatcagagcggaagatttcagtgatgaaaaaatagaagatcttacataccttcatcaaatggtcatgaaaaaagcatcattcagcccgagtgaaatgcaggccattgccgaggagctcgcctctctcagaaaataaacccgtgtcagacctgccgaaaaacggcgggtctttttttgatttaaaaaagtaaaaaataaaagttcatcggtttgacacatataaaaagaaggagtatagtaactgtgaacttggtagaacgatatactaaatgagcgggccgcttatctttttttatttagtagaacgatatactcgttgtgatatcagcgttattcaagttttgtatctgcaaccgttttatcaaaccagttttcaaagaaaggcagtggttcaataaaggggaatggttctgtgcttttgttaatttaaaaattaatttaattctttattaaccgcattaggggatgtcatcatgaaaaacatatacaccaaaatggcagcgggtctttatattaattatttcctgctgggcatgatcaatattattatcgcatccaatatggaggcattatcaaaacagcttcatacatccgcagccggggtcagctatttggtctccgccatcgggatcgggaagctgatttcgcttctgtttgccgggaagctttcggatacattcgggagacggccgtttatcgtgtcgggcgcctttctgtatctgattttcctaatcggaattccgctttcgacaaactatacggccgcgtttatcttcgccattttcgcagggatcgccaattccttcttggattccgggacatatccggcgcttattgaaggatttccgaaaaacgcaagctctgcaaccgtgttaatcaaagcgtttgtatccatcggcgcgacggtgcttccgtttttcatcgcgtttattgcggacaggcatttgttttacggctggacgtttttcgtaccgggcattattttcttcctgaacggctttttcctgttaaaagttccgtttccgaatcataagcaaaaagaagacggcggccggacggaagcctctccgtctgatgacgcgttcacatcacagccgtcgatatggcgcgaaggtcttgcgatcattctgttaggcttttcatctacggcgctgtttatgctcgttcaagtatggcttcctaagttcgggcaaaccgttttgggcatgcctgaggtgcaggctgtcaaattgctgagctattacagcatcggtgcgcttgtgtccgtattattgctggccgtgctgttaaacagagtgattcagccgattacggtaatggtgctgtaccctgtgatcgcggcaatcgcgctgcttgctctgattttcattcatcagccggccgtatcagtcatcagctcctttgtcatcggactttcaactgcgggcattctgcaattggcgatgacggttatggctgttttattccctaaaaataaaggtacgatcacatcttttgttaatatagcatcaagcttatcttttattgtcattccgcttgtaacgggagcgatctccaaagcggccggcctgacgcctgtttttctgcttgatatcggaattgcggccgtcagcgcccttctcgcattgtttatcggaatccgctttaagcaagtgatgaaagcctgactattttttaagggagaggatttatcatgcaatctatcacgatcagaaacacggtcatcggcgaagggcttccgaagatcattgtgccgctgatggcggccggagagaaagaactgctcgaagaaattgaagccgtcaacaggcttcgcccggatatcattgagtggcgggcggatgtgtacgagcacgttgacagcctggacgccgtaaaaggcatgcttgaaaagctgcggaaagccgcaggcgcaacaccgctgcttttcacattcagaactcataaagaaggcggaaataaagttattgatgaccgcttttacattgaattgcttaaaaccgccatcgaaacaaaacacattgaccttgcagacgttgagttgtttacgggagaagcggaagtcaaatcaattgtgaaaaccgctgaagacaacggcgtatatgtcgtcatgtccaatcatgattttcatcagacaccgaaaaaagaagaaatcatttcccggctgcggaacatgcaggcgtacggcgcgcacattccgaaaatcgcggtgatgccgcaaagcactgaagatgttttcgtcttattggatgccactcacacgatgaaaacacaatacgcagaccggccgatcatcacgatgtcaatggcgggaacaggtctgatcagccgcctggccggcgaggtcttcggctcagcgtgcacgttcggagcgggcaaagaagcatcagcgcccggacaaattcccgttgaagaattgcgcagcgtactcagcattttaaataaacatatgtaatcagcgtttttctgcccttaaagcgggatgaaaaacaaatgaatggactaacggaggaatacatcatgaagaaagatttaggacggattaacggaaaaactcagcttatcggattattcgcgacaccgatcggacactctttatctccggcgatgcacaacctggcgtttaaaaaattaggattgaactacgcatacctcgcgtttgaagtcggcaatgaacagctggaagatgtggtaacgggaatgcgcgccttaaacgtcagaggcttcaatgtctcgatgccgaacaagatgaacattctcccttacctcgatgaactcgcggattcagcgaaattcaccggcgcggtaaatacagtcgttaatgaaaacggcagactgatcggacactccactgacggtatgggatacgtccgcaacttaaaagaacacggcatcgatatcacgggcaaaaaaatgacgctggtcggttccggcggggccgccactccgatagcgattcaatccgcattggaaggcctcggagaaatctctattttcgcccgcaatgacgcgtttttcgaaaaagcggaagaaaacgtccgcatcatcaatgaagaaatgaagggatcttcttgcaaagcgaaagtcttcccgctcgaagatcaagatgcgctgcgtgctgaaatcgcttcaagcgatattttcacaaacggaacgggtgtcggcatgaaaccgcttgaaggcttgagcgtcattgaagatacatccatgctccgtccggatttgattgtgacagacgtcgtttacaaccccgttacgtcgaaattgcttgaacaagctcaagcggccggctgcaacaccattaacggcctcggcatgatgctttggcagggcgccatggcgtttgaatattggacaggccgtgaaatgccggttcagtatattaaagagcaaatgtttgaataacctattgtgacagaagcgccgaaggacaatccgtcttccggcgctttatcattttctccccctctctctttcttctcatgcgccaaaacgcttataatggatgtaacgaataaaaaccaagtgaggaatgcgacgtatgaaacagcaaaaaaaacgccgggtgacattgcagcaggtcgctgaacatgccggcgtctcaacatccaccgcttcattaatcgtccgcaataatccgcgaatttccgaagcgacccgtgagaaagtgctgcaatccatgcgggagctggggtacgtatatgatcgggtcgccgcgaatttacgatcacagacgtccacaacggtaggattgattattactgacatttccaatacgtttttctcagagtttctgatcggcgttcagaatacgcttgaggaagtcggattaacggtgctgttaggcacgacatttgattccgtcgcgaagcaggagcagctgatctcgaccatgctggagcacagggtcggcggattgattttgtgtccggtttcaggtacggctgaggaaaccctttcccgccttgagcagcttgacattccggtcgtgctcgccgtcagggagattgccgatgccgactgtgattttgtcggagccgattatgaggaaggcacctataaggcagtgcgtcatttcattgagaaaggccatcaggagattgcgtttctgggcggcgtgaagcactcgtcaacatggacgaagcgcatgaaagggtttaaaaaagcgctccgtgaagcggatctggaagtaaaaaatgactatgtcattgacagcgcgccgacccgcgaagcaggctgtgaagccgtgacggagctcctccgccggtctgagcgcccgaccgcgattttctgcttcagtgatttggtcgcgttcggcgtcatgcaagggatcagaaaagccgggctcattccgggcgaagatattgacattgtcggctttgataacgtgccggaagctgaaatttcttatcccccgcttacaaccgtttcttcctttccgcggcagtcgggaaaagaagcggctcaattgctgcatcataaaatcaccagttcccagcacaaaaaacaacgcattattctggcgcctgagctggttatccgggaatcttcacaaaaaaagcggaacgcctgatacggcgctccgcttttatattacgcaagcagttttaatgattcgcggttgaatgccggtatgtcatccggtgtgcggcttgtgaccagctggttctggcagacgacgacttcttcatccacaacattcgcgcccgcgttttccatgtcgattcggattgatgtaaaccctgtcgctttgcgcccgtccaatgctttcgcgttgatgagaagctgaggtccgtggcagatggcgaacaccggttttttatcatccataaacgctttggcaaattggacgaaacgatcatccgcacgcagcatatcaggcgagaatccgcccgggatcagcaatgcgtcaaagtctttcggattcacatcatcgatggacgcatccactttcacttccgcttccccttgtttgcctttgactgtttttcctttttcctgttcaattacggttaattcatgacctgcatctttaaaagctttcgcaggttcagtatactcgacatcctcaaaataatccgttaatacaactgcaatttttttacccatagttactacctcctgcttgatgaagtctacataaatccatgtaccccagccacactaacatcaaacataggtaacgcgtttgccgctcatccgttttacataggtcattatcctcatttttcatctttttacaagaatcatcatgaaatctatatgaactttcacaaaatattcttacaatggtactgcatgacaaaatttgttgaaaggtggagaacaggtgagaatacagaaaagacgatgcagcgtcaatatgacactccgtattctgctgcccctagttatgatacttagtctaatcctcccaacatcacccattaaagcagaagaaaacaaatcctccagtgtgaatctcagcattttagccacaactgacgttcacgctaacatgatggactacgattactacagcgacaaaccgacaacggaattcgggctggcccgaacggctcagcttattgagaagcacaggcgcgaaaacccgaatacgctgcttgtcgataacggagacctgattcaggggaatcccctcggagaatacgccgtaaaatatgagaaaaatgatattatttcaggcgcaaagacccatccgatcattgaagtgatgaacagtctgcattatgacgcaggaacactcggcaatcatgaatttaattatgggcttgaatttctggacgggacaatcaaaggcgctgattatccgatcgttaacgccaatgtgaaaacattaagcggcgaaaaccgttatacgccttatgtcataaaagacaaaaccgtcacggatgaaaacggcggcaagcatcagataaaagtcggctacatcggctttgttcctccccaaatcatgacgtgggataagaaaaatctcgaaggccgcgttcaggtcgaagacattgtggaatccgcaaagaaaaccgttccgaaaatgaaagctgaaggagccgatatcgtcatcgccctcgcccacagcggcatcgaaaaaaaagcgcagtcttccggagcggaaaacgccgtttttgacctggcaacgaaagtcagcggaattgatgcgatcgtatccggccatcagcacgggcttttccctgatgccgaatacaaaggcgctgatcaatttgacgtcgataaaggcacgattaacggcatccccgttgtcatgtcaagcagctggggcaaatatgcgggcgtcatcgacctccggcttgaaaaaacagacagcgcgtggcatgtggaagatgcaaaaggcagcatcgagccgattgccggcaatgtgacgtcggaaaacgaaaccgtcgtcaataccgtcaaaaaagcgcacgaaggcacattgaaatacatcagagaacccgtcggccagacaaaagccgatatcaacagtttcttcgcccaagtcaaagatgatccgtccattcaaatcgtaacggatgcgcaaaaatggtacgccgaaaataagatgaaggatacggaatacaaagatctgcctatcctctcggcgggcgccccgtttaaagccggcgggcggaacggctcaaactactatacaaacatttccgctggcgacctcgccatcaaaaatatcggcgatttgtacctgtatgacaacacggttcagatcgtcaagctgaacggaagcgaagtgaaggactggctcgaaatgtccgcagggcaatttaatcagatcgatcaggcaaaaggcggcagccaagcgcttttaaatgacgcctaccgctcatacaattttgatgtcattgacggtgtcacctatcaggtcgatgtcacaaaaccggcgaaatacaacgaaaacggaacagtcattcatcccgatgcaagccggatcgtcaacctttcttatcaaggaaagcccgtcagcgccaagcaggaatttctgatcgtcacaaataattaccgcgcttcaggcggcggaggattccctcacttaagcaatgataaaatcgtatactcttctgccgatgagaacaggcaggtcttaatggattacatcatccagcagaaaacgattaatccgcaggctgatcataactggtccatccttccggtcaaaggggcaaacatgacatttgaatcttccttggccgcaaagccgtttgccgaccgcgcagatgacgtcgcctatatcggtgaatcacaaaacgcgggctacggacagtacaagctccaattcaaagatgatgaaccgggcacagatccgccgaaagatgacgcatggaaactcaccgttatgcatacaaacgacacgcacgcccaccttgataacgcggcgaggcggatgacgaaaatcaaagaaatcagaagcgaaaccgaccgcagcattttgctggatgcgggagacgttttctcaggcgatctctatttcacaaagtggcaggggctggctgatttaaaattgatgaacagcatgggttacgacgcaatgactttcggaaatcatgagtttgataaaggcccgggtgctctcgccagcttcctgagcgggaacggaagcgcggctgacccgtccggaaaatacaattttcaagcgcctgactttccgctcgtcagctcaaatgtcgatgtgtccaaagagtcaaaactcagaccattcatgaaaaaagcagacacatttacggcagggaaaaagaaaaaagcaggcatctatccatacattctgcttgatgtaaacggagaaaaagtcgccgtattcggcttaacgacagaagatacgtccgtcacatcaagcccgggaaaaagcattgtctttcatgatgccttccaatccgcacaagatacagtaaaagaaatacagaataatgaacatgtcaataaaattatcgccctgacccatatcgggcatcagcgtgatctcgatcttgccaaaaaggtaaaaggcatcgacttgatcgtcggcggacatacgcatacgcttgtagataaaatggaagttgtcaaaaacgaagagccgaccatcgtcgcccaggcaaaagaatatggcgaatatttaggccgtgtcgatgtcgcatttgacaaaaacggcgtcgttctgccggaacaatcctctcttcaggcgattccagtgaacgagcagacgaaagaagacccggatctgaaaaaagagcttgatccgtttaaaaaagagctcgtctcagtcaaaaatgaaaaagtcggctcaacgaaggtcgcacttgacggccagcgcgagcatgtccgctccaaagaaaccaatctcggaaacttcatcgcggacggcatgctgcaaaaagcgaaggaagcggccggcgcccaaatcgcgatcacaaacgggggcggcatccgcgcgggcattgataaaggagacatcacactcggcgatgtgctgaatgtgatgccgttcggcaacacgctttacgtcgcggatttaaccggaaaacagatcaaacaagccttggaacaagggttaagcggaattgaggctcaaggcggcgccttccctcaagttgccggtttaacatacacgtttacactgaataaaaagccgggacaccgcgttcttcaagctgcggccgtacaggatgacggcagcgtaaagccgatttctgataagaagacatacagagtcgccaccagtaactttgtcggtgaaggcggagacggatattccgtctttaacgaagcgtcccataaagaagaccttggctttgtcgactatgaggtcttcaccgagcagcttgaaaaagcgggaaaagcggtggaaccgaaagttgacggccgcgcgcaggaagtgtatctgccgacgaaacaaaaaaacggttcgtggacgcttgaagatgacagcgcatttgccgtttatgccaaaaacgccaacacgccgatcgtgtattacgataagaatgacggcgccaaaaagccgattgatctcagcgtgaccaaaaaacaaatcggcctgttaaaggacagaacatcggattcttcccttacgatcctgcatgacaagttcagcatgaaaatgccgatggcaaacgctgcttcagctgatacacgattcggcgtgacgccgaaaggaaaagtaagcggggcgctttcaaatgtatacgactttacaatgaagcagaaaaacaaagacatcaaaacattcaaagcgccggtaaagctcaccctgcgcattgagaatacgaaaaaggcgaaacagccgggcatttaccatgtagaccggaaaaagaacgtctatacaaaaacagacaacggttcggtttcacacgatctcgtcacgggctatacaaatcatttcagtgaatacaccatattaaacgcaaacacgaagagcgcgccgccgacaagcggagaccacggctccggaaagcagccaagcggacaaaaaccgtcatccggccctgcacaggacggagtatcgccgggcggcctgcttcctgatacggccacaacgatgtattccatccttcttgccgggtttctcatcagcgcgctcggaacggcactgtatctgcatcaaagaagaaaagcaaaaaaagtgaacgaagcataaaaagaccgcttttatcgggcggttcatccaaaagctctcctgatctgatttcaggggagctttttctctcggtccccctctgagtcgacagccgtacggccgagtgataaaatatgaacgttattcgcgaaagactgcatccgcatcgtttaacacttcacggcagggcctctctttcatacggcgccgcctgtttggaggactttttttgaagataacaggacacaaacgaaaccgcatgtcttacaagaaaaagctgttttacgtgataacagcgctctgttttatcagctcgctcattttcgtcactcacaacgcttctttttatgagcggccgattgccaaagtgacgaaaacaacattggaacatcagtctgacgtacaggacatgcataaaaacaaagataagattttcaatcagacgatcactgccagacttgaaaacggcagtcagaaaggacagctcattcatttgtccaatcagtattcatcatccggagcgaatgatcagaaatattcgattggagatgaagtattcgtttctattgataaagggaaaccatcaaacaaggatatatcgggaagcattatagataaaaaacgggataagcagcttttgctgatcgcttgggttttcatcttcaccttgcttatcgtcggcaaaaaacaaggcttcttttcgatcgtcagcctgatgtttaacgccgttttactgtcgtttgcattagatttgtacaggaagcatcctaatatagggttaattttcatctgcggtgtctgtattctcatctttactgtcatctcattgctgcttgtcagcggttttcacgcgaaaacatatgcagccattgccgcgacgctcgcaggcactttcgtttccctgctgattacgtatctggtgatgctggcaaccggtgagaaaggtctcagatatgaggaaatgcagtatttaacccgcccttatcacacggtgttcatggccggggtatttatcggatcactgggagcggtcatggatgtagccattaccatgacgtcatctgtcttcggattatatgaagaaaacaagggaatctcattacaagctctcagacgttccgggatggagatcggaaaagacatcatgggggcgatgaccaacattctgttttttgcttatataagcggctctattccgatgatgctgttgtatttgaaaaatgattccccgataggattcactctttctatgaacatttccttggaaatagccagagcattggccggagggatcggaatcgtattagccatacccgccagtctgtatgcttctatcttttttattaaacgaaagaaggcaagctcatgaatgtcatcgtaattctcgcggcgattttatttctattgatggtcatcatcggcggaaaaaaaggagcgaggtcttttattgcgttattcttaaatttcggtgttctctttctcaccatcattttcatgacagacccgcatatcaatccgattgttttaacattgctctcttccgccgtgatttgcagcattactcttttttatattaatggaggaaacgtcaaaaccgtaaccgcctttatttctgcaatgctgacgattgtactgctgctgttttttattatgtctgtaacaaaacatacttcgattcagggattcggtgaagaagaattgggtgatatcggcatattcacactgtttgtcggggtggattttgtgaaggttaccgcagccatgatcatcatgggcacgataggggcgattaccgatgtcgcgatttcaattacttcacccatgcgggaaatttacagtcataatccgtccatgagcagaaaagatctgtacacattcggattaagcatcgggagagatattttaggaacgaatacgaatacgttattctttgcttttttcggcagctatttggctttaattatctggtttaaagacttatcatactcagctgaaaaaatagtgaactcaaaagtattcagtgcggaagccgtcaccattctttgtgccggaatcgggatcggcatcatcattcccgttacatcctggatcaccgcctgttttttagcaaaaccgaataaacgttaaaagctgccgggacacgcccggcagctttttttatcttatacccactttacaacgtcttttgaggcagatcttgttttcgggcgcggttctctgacacggtagccgaatgcggccataacagagatgtcgaaacttccgttttccagaagcccttcttcttcaagaatccggtgaatttctttgtagttgaagccttctacagggcaggagtcgattccgatctgcgcagcggctgtcatcatattgccgagggcgatgtaagtctgtttggatgcccagtcaaacagcgcgcgatctgattctagcagattgaaatcatttttctggaagtcttccgttttgctgatatagccttcatacatatcttccggcatttttttgacttcccgcaagtggtttttgacatagtcggcgtcaaaacggatatcctttgccgtccgggcaagcagaagtacgaaatggcttgcggtcggcagctgcttttgcgcgccccaagtgaactcgcggagtttttcacgaagctccggattttgaacgacgacaaatttccaaggctccaaaccgagtgagcttggggataatcttcccgtttctaaaatgaattcaaaatcgctttctgaaatttttttctcaggatcaaattcctttgtggcgtgtctgaattgatacgcttcgatgatctgctgttttttatctgacattcatgatctctccttttcaatcgttatgtactattgtagccattatttttgaaagtaccagtacgcacatttttgtgggatagtattcattttgatactgacaaaaaaacgggctgccgcggcagtccgtttttatttttctcttctcgcaaagtcgacgaaacggaatttatcgagcctgtgccggctttccgtgtactgaaagaggctggtatcctccaaaaagacgcggtttttcacgaccgccatatggctgaacccgcctagatccaaatacttccggtcctcctcccccgccggctccacgacaatttccttttgcgcgtagctgatggagaggccaagttctccttcgagatactcatagatcgaatcttcacaaatcgccttcgtcaatagaggcacatgttttttcacaaagtaatccttgtccaaaataatatgttctccgtcaatccgtcttgatctgacgacttcccacaccttttcatccgcttctgtaccaagctcttttgcggcttctgagggaggcaggatcagcccgagacggtgaaccgtcgttctcgtctcttttccgagcgtttccgaaacctctttgaagctgatcaggcctgagacgggaaaacgcattttttctctgtctaatatgacggagcctttgcctttgattttctggatgtagccgttttgcgccagcatattgagcgctttgcggacggtttctcgtgatgtgccgtattgatcgcacaaatcattttcagacggaagaacgtcttcagcctgccgctggccactttcgatctgccgcaccatatctttatagattgtgatgtatttattcactttcatttgaccacccagattagtgtatcacgcttttgtcagatgataaacgatcgattcatacggacggagcgtcaatcgttccggccgcccttccctcggttcatcattcgtcagcagcaccgtaaaccgccagccgtccgtgtctttaagcggaaccgtaaagtccgcttctttcccgtagaagttgttgatgcacagcagtttttcatccttgccgtgtctgacgtacgccagaaccgccggatcgtcttcagcaagcagctcaaacgttccttcagtcacgatgtcatattcttttctgagcttgatgagcttctgataatggtagaaaattgaatccaggtcccgcaaagccgcttccgcgttaacgtcccgataatcatccgccgccggaatccaaggcgtgcccgtcgtgaaaccgccgtgcggcccgctgttccactgaatgggggttcttgcattgtctcttgatttctcttttaaaatggcgataatgtctttttcgggcacgccttcttccttcatctttttgtaaatattcaatgattcgacatcgcggtatgagccgatatcatcgaatttcggattgcccatgccgatctcttcaccttgataaatgtaaggcgtgccctgcatcatatgaatggccgccgccagcattttggctgatttcgtccggtatacgccgtcgtctccgtatctggatacggcccgcggctggtcatggttgcaccagaataatgcgttccagcctccgcctttttgcatctccgtctgccaaaacgctaaaatccgtttcagcttcagaaaatcaaacggagcgagcgcccatttttcaccattcggataatccacttttaaatggtgaaagttaaaagtcatatcgagttctttattctcagggtttgtgtaccggatgcagtggtcagccgttgtcgaggacatttcaccgaccgtcatgctgtcatatttcgaaaacacttcccggttcatctcatggagaaattcgtgcacgcgcggcccgtccgtataataagggcgcccgtcacgcccatcctcggcatcaggaaacgattggtctttagaaatgaggttgatcacatccagccggaaaccgtcgattccttttcggaaccaaaaatgcatcatgtcgtaaacctcttttctcatctcttcattttcccagttcaaatcggcctgcgacacatcaaataaatgcagatagtgctggcctgacgccaggtcgagctcccaagcggaaccgccgaattttgattcccagttgttcggcgcccggccgtcttcctttccgtctttccaaatgtaaaaatcccgatacggactgtcgggtgacgagaccgcttctttgaaccaccgatgctcgactgatgtatggttgacgacaagatccataacgaccttgattcctcttttgtgcgcttcatcgagaaggcgttcaaaatcctccatcgttccgtactcttcataaacggtgcagtaatcgcgaatgtcataaccgttgtcattctgcggcgaatcgtaaatcggcgtaagccaaatgacatcaatcaaaagcttctgcaaataatcaagcttctcgataataccgttcagatcaccgatcccgtttcccgtcgtatcattaaagctcttcggataaatttgatataccgctgcctttttccaccatggtgtgctgtctgttttcatttttcttcaccgcctgtaatgttttgaattgaaagggaaaagggacagcctgatagaaggcgccccgcaggttttctatttttgccgtttcagccgcgcatacccgtatgttcccgcaaacgggagaatcagcacgatcagcattccgatcgcaaacggaccccagtaccggctcataatggagaagatccccggcacgccgccgactccgaccgagcttgcgagaacgcctttgacggagatgaacatccccgcgattcccgaactgatcatggcgatcacaaacggaaatttgtaacgcagattcacgccgaaaatcgccggttcggtaatgcccaaatatgcggaaatgccggccgtcagtgaaagcccccgctgttttttatcttttgtaatcagcatcatggccaaagccgccgatccttgagcgatatttgacaatgcgagcatcggccataaaaatgtgccgccgagctttgatccgattaattgaagatcgaccgcgagaaacgtatggtgcatccccgtgatcacaagcgccgaatacagccctccgtacagcaggcctccgatggcggagaattgtccgaaaacggcaatcaatcccaccgtcagcgcgttaccgatcgcaaaggtaatcggaccgatgatgacaaaggatagaaaaccgatgaccaaaagcgtcaccggcgcgacgaccaacagctgaatgccctccggcgtccgtttcgtcaaaaagagctcaagcctggcaagtaaataagacgccagcaggatcgggagcacctgaccttgatatccgactttctgcacctcaaggccgaacaggttccacaccggaatatcgccgctctgctcggcagccccgtagccccatgcgtttaacagatcaggatgcaccaacatcagcccgagcacgatacccaagagcgggcttcctccgaaccgcttcactgccgaccagccgattaaagccggcagaaaagcgaaggccgtccccgcgatcagattaatcatattggcgagatccgcccattgcggatacacttggacaatcgatttggcgctgtagaaaatgccttccgccgttaatatattgttcagacccattaacagcccggccgtgacgatcgccggcaagatcggaataaagatgtccgcaagcgttttcacagcacgctgtaaaggattcatgttttgcgccgccgccttcttcacgtcatccttggacgcttcacccatccccgtttccttcactaattccgcatatactttgttgaccgtcccctgcccgatcacgacttgaaactgcccgtttaccgcaaaagatcctttgacaatgtctattgcatcaagcattttttggtttactttggtttcatctattaatgcaaaccgcaaacgcgtcacacaatgagtcgccgcctcaatattttcgattccgccgacagcttcagcgatctgccgcgcagcccggttaaactcacccatgccatcccctccgtaaccgttttcattttgtcttgcaaacttgtatatacatgtttatgactctattgtaatgatgtatatacatgtcgtcaatctatttttatagcgctttcatcacaaatatactgcgaaagaccctgaaacaaaaaaagccccgccggaaccgggccttgacttcttgtttatcgggaacatgtccgggcggaattcacaacaggagcacaaaaagcatacagtactgtacaactaagttaaagaggtgtgaagagatgccatccactgttatcaacctgtactatttgaagattaacagtatttctggcaacggatctattacgattggggaagcggcatacaacagtcccaccacaaataacaaatcacaaggactgaactcttcattcggcgatacgtcacctatagaatcgatgatggagaacttgttaaatgatcctgatgtcaacgaccagacagccatcggaaccgcagataccgcaaatattacgccggtgccgcccattatagattaaaggggtttttatgaatgccttaccaaattaacgtcgtcaatataaaagtaaacggagcaacgcaaaacggaaacgtcgatatcggtcagaccgtacaaaacagccacaccgccaacagcaaatttgtcggcgcgaacttttctttaggggatttttcgccggccgccggatgtttgaattcgggccatcttgaccctgacgtgagcgatcaggatcagatcgccaacccgtcaatgccgatcgcaaatcaaatatagggaggttctgccgaagtggatatcgagaaaatgagaaagtggcttgagattacgaacgagcacaagcccagcgaattttggaccaatgtcctgaaacggaaatctctcgaagattttttctccttacaaaaaaacaccctgacttatgatatttatcaggatgaacagcacacatttgtcattgtggaaatgcccggcgtttacgaagaagaattgacattgaggctgctgtcaagaacacggctgcatataagaggaaacatcacacccctttttccaaagaacatgggcgtctgccaaaaccggtattacggggaaatcgatgagacgattgagcttcctgaaccggctgagccccacctgttacaggcgcagtgcgtaaacggcctgctccacatttcctacccgcgccttatggagcacattccttttcagaaaaaaatctaaagagccggcttacgggcggcccagccgtctgtacactttctccttataatgagaagatacgggttttgagaacatggctttctcctccgtcagtttgtcgagtctgacttgtttttccgtccgtttgttccgcaggtgatcccgctcctgttcattgcggcacttggcgatcaaataatcgagcgtcatcagctctttcttcagcgcgccctcatcctcggcgatcccggcgttttttaatatgcggtagcccattctgagcgactccggaagatgtgcggcatcgtctttcggcaggggctttcccattcctttgatgccggcgaactctccatccttaatggcgcgcttgattttatcttcagccacgatatgggcaatatccatcactgttcacctcttttttcaatagaaccgggtatgatcatacggaaacacaaatcccagtttgtgccatttatatgttttaaagctgtcattcaacagatcaaccgccgttgcgacagcgtttttcgccctttttccgatgagccttttccaccttttctatttgctggtttcatggtatattgattacgttcgttttttctatcgttccgtgtaaaccgtgatcggaaaaaaggagtgtaacaatgaaaacatttataaaagaaagaggacttgccttcttcttgatagcggtcgtgttattgtgggtgaaaacatatgtcgcttatattttaaactttaacctcggcatagacaacacgatccagaaaatattgctttttgtgaatccgctgagctccagcttgttctttcttggatttgggcttcttttcaagaaaaaattacagcagacagccattattgtgattcattttttattgtcttttttgctttttgcaaacatcgtctattatagattctttaatgatttcattaccatcccggtcatgatgcaggcaaagacaaacggcggccagctcggagacagcgcgttctcgttaatgagatggacagacgccttctacttcctggataccgtcattttgattattttggcccttaagatgaaaaaaccggctgaaaaaccggcgaagaaatcattcagaatcgttttggcttccgccgtgcttatgttcctgatcaacctcgccgtcgcggaatccgaccgtcctgagcttttgacacgctcatttgaccgaaactatctggtgaaatacttgggcacgtacaactttacgatttacgatgccgtgcagaatgtgaaatcaaacagccagcgcgcgcttgccgattcaagcgatgtaacggatgtagaaaactatatgaaggccaactatgacgtgccgaacaacgtctacttcggaaaagccgaaggaaaaaacgtcatctacgtctcattagagtctctgcaatcctttatcattgattacaaaattaacggcaaggaagtgacgccgtttttaaacaaactggcgcacgataatcaaacattctactttgataactttttccaccaaacgggacaaggtaaaacatctgatgcggaatttatgatggagaactctctgtacccgctttcgcaaggttcggttttcgtcaataaagcgcaaaacacgctgcagtccgttcctgcgatcttaaaaggcaaaaagtacacgtctgccgctttccacggaaatacgcagactttctggaaccgtaacgaaatgtacaaagcggaaggcatcgataagtttttcgattccgcttattatgacatgagcgaagaaaacacgaaaaactacggcatgaaagacaaaccgtatttcaaagaatccatgccgctcttaaagagcctgccgcagccgttctatacgaagttcattacgctgtccaaccacttcccgttcggaatggataaagaagacacggacttcccggcgggagactttggcgattcagtcgtcaataactacttccagtccgcgaactatctggatgaatcaattgaacagttctttcatgacctgaaaaaagacggcctgtacgataagtcgattatcgtgatgtacggagaccactacggcatctccgaaaaccataataaagcgatggcgaaagtgctcggcaaagatgagatcactgaatacgacaatgcccagcttcagcgggtgccgctctttatccacgctcccggcgtgaaaggcggccgcaatcacaaatttgccggtgaagtcgatgtcgcgccgaccgttcttcatctgctcggcgtcgatacgaaagattatctcatgtcaggttcagatatcttatcgaaagagcacagagaagtcattccgttccgtaacggagacttcatctcaccgaactatacgaaagtgtccggcaagtattacgatacgaaaaccggaagacttttagatgattcagaagtcgacaaaaaagaagactctctcgtcaagactgagcttgaaatgtctgataagatcatcaacggcgatctgcttcgtttctatcagccgaaaggctttaagaaagtggacccttcacaatttgattatacgaagcgtgaagattcctcagcagatgatcaaaaagaataaacaaaagccagatcatatcaatgatctggcttttttatgttcagctcccggcggcggccatagagcgcttttgcaggctgtcggaaagaactgaataagcgacgactttctttttctgctgtttgacgacatctacatgatcttcgtagctgtatacaaacaccgtcacatctttttttccttttctcgtcttaatgacaagcggatcggctccgttttgcggatgaagataacgctcttcatcccctgggtatatataatgccgttcgataaacacggcttcgttaaaatcatcaatcacccggcgtttgtcttcgccttccagacgttttccgccgagggaaacggcagcggacgcgtcactgagctttgaatgggtttcaaacttgcggaggatccattccaccgctccggtaggaaggcatgtcagcacaatcttaatcaggcttatgacaacaattgaaacaactgcaatccatgtcaccttacatcatctccatacttgttctacctgaatcttaacatagaagaaaacgttgttttttgtacattatgtgaaacttgatatatgttcaaaaaaaatccggatcacctaggtgatccggatttttcaagtttgcttctggtcgtcacggcggacggcttctctcagctcttccgcgacaaattcgacgttcggcccgataatgacctgcgccgttttattccccgttttgataaccccttttgctcccgcttttttaagcgccgcctcattaatgagagacgtatcctgcacggtcagcctgaggcgggtcgcacagtgatcaatcgtttcgaggttttgcctgccgccgagccccttgagcatggcatgttcttcgacggaaccggccgtatcttcactaagcacttcttcctcttcctcatcatcttcccgtcccggcgttttcaagtttaacgttttgatgagcatatagaagacgacaaaatagatcactgcataacaaagcccgacaacgagcagcaaaagcggtttttcggcaatgccgtagctgaggagataatcgatcgcccccgccgagaatgaaaaacccgacctgattccgagaacattcacgataaataaagagaacccggttaatatagcatgaaccccgtacaaaagcggtgataaaaacataaatgcaaattcaatcggctctgtaattccggtaataaatgccgtcagcgcgagaccaatcatcattccggccgtcgctttgcgcttacttggcttagccgcggcaatcattgccagacatgcggccggaagcccgaacatcataatcgggaagaatcccgtcatataagttcccgccgtcggatccttcgcaaagaagcgggccagatctcccgtttttccgtgaaaatcgccaaactggaaccaaaaaatattattcagcacatgatgaagaccgaatggaatcaaaagccggttaaaaatcccgtaaatcccggcgccgattccgccaagcccgatcatccattccccgaaagacgtaatcaccgactgaatcggcggccacacaaatccgaagatccccgccaaaataatggtaatcagcgccgttacaatcggaacgagcctgcgcccgctgaaaaacccgagatattcgggcagcttcgtatccttaaaacgattatacgtgtatcccgcaattaaccccgcgataatccctccgaaaacggccatattatttgtcgaattgattgattttacagccgcgtccagcatgatataagaaattgctcccgacagagcggcggccccgttgctgtctttggaaatcccgatcgcgattccgatcgcgaaaatcagcggcagatgatcaaatactgcggtccccgccgcgtaaatgaacggaatatttaataagtcctctctgccgatggccaaaataataccaacggcgggcagaacggcaatcggaagcataaatgattttccgagtttttgcaaaaattgaagcattttacccatcccccttcttttttcttaaatataccacataagttatctagtgatctataccaattttccttcatttattcacataaggcttgttggttttctatttataaaccagttgtggtaagcttgaatcagatgattaaaaatagaaagcgggaatgacaatgattgtaacgaacgatcaagaattagaaggccttaaaaaaatcggcagaatcgtcgcgctggcgcgtgaagaaatgaagaaaaaagccgaacccggtatgagcacgaaagatcttgacctgatcggaaaggctgtgcttgacgagcacggagccgcttccgctccggagaaggaatacgatttcccgggcgtgacatgcatcagcgtaaatgacgaagtcgctcacggcattccgagcgcctctaaaatcttaaaagccggagatcttgtaaatatcgatatttcggcggaattcggcggtttttattccgatacgggaatttcatttgtgctcggagaaggcgatgaacgtctgcaaaagctttgtaactgcgcagcatcggcatttcagaaaggattggatcaggcaaaagccggcaaacgccaaaaccagatcggcagagccgtctaccatgaagcccgctccaacggatttaccgttattaaaacgctgacgggccacggaatcggcagaaacctccatgaagcgccgaaccacatcatgaattactacgatccgtttgataacgcgctgtttaaaaacggaaccgtgatcgcgcttgagccgtttatttccacgaaagcggaaacgattgttgaagcgggagacggctggacgtttaaaacgccggataaaagccttgtcgcccaagtggaacacaccatcgtgatcacaaaagacaaaccgattattttaactgcactgtaatgtttcatctcccttccaaacaggtatacaacaactaacccgaaggagggagacgcatgaaaaaagataaagaaaaaatcaaaatcgaaaacgaaatacacgccatgcacggcgtaacgaaacagcagattttagaggatttcgaggaatttaaggcgtaccttcatcagaaaatttccgccggaaaaaaactgggtctggatgacagcaaaatcatcaaaagcgccgccatcctcggggactatctcgccaaacacgaggagccccgcaatgcggaagaaaaactcttacaagaactgtgggacattgcggatgacaatgaaaaacagcatttggcccagcttctcgtcaaacttgccggacactgatacagtgcccggcttttttatgctccgttataagagttgtgctacactggacatatgtctgtgaaaggagccatttttcaacatgtggtttattatcttcgggtttattttctttattgaaagcatcattctcaccgtttacggagtgaagaaaaagaaggggatgctgatttatttcggcgtcgttttcggaatcatgacactcggaacggtgctgttaaaattaaccggccattaagcatgaaaagaccgccctttacatatatatgtaagaaagctttacatctctgaatcgaaagtctcagtttttgcgttatcccttttcagcgtctttttatagatgttacaatgccaaaagtttggcaaaaactgaagaaacctccccagcgggagaacggagaaaggagttttctgacatgcattatggcagtaaaggctggtatgtagaagagttaaagaaaaaaggaattacccactatgaaggaagaaagcttcaaagcttcaaaaagtacttccttgccaatctgctggaaacaaaaaaacaagcataacgtaaatcagccgtgctgtcagtgcagcacggctttttttctatacattagtgagcctgtctctttttttaaggaaggactccctccagctttctgacagcgcttcttcccgcagtatttcttcaatcgctgacagattgccggaatcacgatatttcacttcattcgcataccagacggaaatgctttcttttcctctcgacagacgcttgaggacgggacgcggatcgacatatccttcttcaagcaccctgaaataaaagccggtaaatcccgtctgctgtacacggagcaccatatctttgatgccatatttgagcgcgagtttgacgcagggctggcgcggctggcttacttgaacgacggcttcccccagctgaaagacgtctccgatccacacgtcttgttcggcaagtcctttgaccgttacattctccccgaacgcggcggcgggaagttttctcgcgagcgttgtttcccaatatgaataatgctcggcgggatacacgcacaccgctttatcggggcctccgtgatgcttcaagtcggcttgcccgtccccgtcaaaatgggttttatacagcatgacgggagaatctgcgggccgctttatgatgccggaattgatttgtctgccggcaaattcatgaattgcgggctttccgagattgatagataagacagaatagtcttgcgtcacctcgttcacatcctttgcgaaatctcatatctttcctttatcatagtaagaaaaaggtggtttttccatgcttcaatatcatatgattgcagacggccgggttcagggcgtaggttttcgctacttcgtccagatggaagccgacagacataaggtagccggctgggtaaaaaaccgtgatgacggccgggtggaaatccttgccgaaggtcctgaagagtcgttaaaacaatttgccgaagcagtcagaaaaggcagccccttctcaaatgtcacaggcgtaaccatcgaagaatcacaccgtctgaaagggtaccgcacttttaccatcagttactgataaggcttgtcctgataataataattcggcttcacaatcgtattgtcatatgatttatggaaaatgtgggtggaagccggcgagatcggcggaatcagccaggtccagtcgcccgtcagctttctgcccgcgtcttgttcctgttcttcaaagcgtttaaattgattcgccgccgtatggtgatcgacaatgctgacaccgtgttttttgtatgaatagagcactgccttattcagttccaccagcacctgatctttccacaggtcggtattcaggctggcggaaatccccatgaccgcagcggcttttttgagcatatcataccgtttttcgtcagcaaggttccttgcgccgatttcggttcccatataccatccgttaaaaggcgccgcgttgtacgacagcccgccgatttcaagcctcatatcggcgataatcggaaccccgtaccatctgagatttaaatcggcaaactcttcaatatccggatgggtgatcggcacttctttcacgagcgtctgaggcaggtcataccagaccggctgcccgtcccctttcatccggaaaagcagcggcagaatatcaaaatcggtccgcttcccgcgccagccgagtttttcgcagacagccgtcagctcatatgatgccggatcaccgactcttcctttttcagtctcatatcccgcatagcggatgagctggtgattccagatctccacttgtttttccccattcttctcaggagggaaaatcgtaatcgtcggtttaatttttccgccgttcgtggcgatttcaatatgttcaaataatgcgtcgcgcacctcttctttcgttttcacaccgcgccggtcaatgacgttcagcgattgccagaacagacgcccgatacagcggttgctgttgcgccacgccattttcgccccgtgttcaagctcttccgccgtatggacgtaactccccgtccgatctatctcatcttttatcgcgtgtagtcgctcgttgatttgcgattccattccgagttcctgatagcagacatcaataaaatccttcgcctcatcccaaagtatttccgtatgtttcaaaaaactctctccttcaatttacatctgtttcccattgtatcgtttttaggtgtgaacacaatggtttttttgtatcatactggaaactgcaaagaaaaaacacctgtgatgttcgcaggtgttttacaaaacggaatgcagtttttcagccagtgtaagcaaatcctcacggtagttttttcccgtcatcggaattccgtgacccgtcaaaagcgcttccggctccagttcggccaatttctcaacggatgcggccgccgtctgcgtatccgctgtaaaataggcgggcggcccgtgaagctcttgcttttgaatgacaacgtccgcaagcgattcctgttccacagtgatcacggcatcaccggcaagcagaacgcggtctttatcccggaataatgaaatatggccgggtgtgtggccgggcgtatgcacccatctccattcttcaagaaacggaacggtaccgtctgaaggcagtgcctgaacggacggaatgcggatcgtatggcgcggaaacagcggtgacagctttgcgacaagcccttttttcgcatcgggcctggcaggcggataatccgctttccccgtgacgtacgggagctccttttcatgaatataaaccggcacatcccaaagctcaagcagctcttcaatcgcaccgacatgatcaaaatggccgtgtgtcaaaatgaccgccttcagctgatacccctctttgaatcggcgtttcatttcttctgttatcatctccgccgattgaggcattcccgcgtcaaccagaatgatttcccgcggagctgagggattttcgataaagtaaacattcgcaatctgcacggtcagtccgtaaacgccgtccgccgctttaaaaccggcgccgcttctcactgaaaaaagcggcataaacggatcactcatcatggcacctcctctgatgcctttagtgtgcgacgaaccgggtgttttatgttaaaaaatcgtgattgcgccgatgatgagcgcaaaggccgtcatgacgataacggcaagaaccgcccatttcatcgcaaatttctggtgttcatcaatggtgaccccggcaagcccgactaataaatgcgtcgacggcacgagcgggcttaacatatgaatcggctggccgataatcgaagcgcgggcgatttccaccttatctacaccgtacgccacggcggtctcggataaaatgggcagcacgccgtaaaaataggcgtcattaggcatcagaaacgtaaagataccgctcgttaaggcaacaatcgccggaataaaacctcccatctgttccggaataagcgatacgagggaaatggccatttcatcaaccatcttcgtccccgttaaaattccggtaaacacgcctgcggcaaaaatcatcgaaccgatcgcaagcacattgctcgaatgggctgaaatacgctccctttgatcgttaagcttcggatagttgacaatcagcgcgatacaaaacgcaatgatgaacagcacggttaaattcacttttcctgacactaaaaatcccactaaagaaagcgttaacagtaaattgaaccaccacagtttcggccgcctccattcatcttccgcagccgcagccgtttcatttgtatgggacggctgctttaattcgatcaccccgagccgttttctttccatccttccgagtacataagcgaccacaatcatacacaccattccgctggcaatgacaggcagcatcggccccgtcagctctgccgggtcaacgccgagcgcactcgccgcacgcggcgtcgcgccgccccatggtatcgtgttcatgatgcccatgccgacaccggcgattcccgctaaaataatcggacggattccgagcatgatatacaaaggcagcattgcgcttgtcgtaatcatatacgtcgtcgagccgtctccgtccagtgcgacaagcatggtcaaaacggctgttccgactacaattttgagcgggtcgcctttaaccagctttaaaatacgcgacaccatcggatcaaataaaccggtatcaatcataatgccgaaataaagaatcgcaaacataatcatgactgcaatcggtgccacctgttcaatcccggaaatcatcatctcgccgacccggttaaaagaaaacccggcaaacagcgcaaacacgatcggcgttaatacgagcgccgttaacactgaaagccgttttgtcataatcagcaccataaaaacaagcatcataagaaagcctaagattgctaacacagtatgtcccccttatcgtgaatacgcttacattttaaaggcccgatcccctttatccgcctttttgctatcttatgagaattggatattgaagtaaatattttggattttaaagatttttaattttttataaccttttcgttcattttgttcatttataaataaaaagcctcccgcaaatatgcggaaggcttatttttcgctgctcatcatctctttataaaactcggtctgctcttctaaaaagcgttttgcgccgctgctgtttttataaaagctctcccaatcccgttttttcaacatttgcttccactccgcggatgaggtaatctgtttcaaagcctgatcccaataggcgatctcgccttcggtcatgtctttcggccccatgatgcctctccagtgcgcaaagacaaacggcaccccctgctctttccatgtcggcacatcgctgaagccggagagccttttgtccgacgtaacggccgccaatgtgattttccctttccgataggcgtctctcgcttctgaaatggtcattgaggcggcgtctatctcgtggctgataagagcttcaatgacttcattgctgctcccgtattgaaaaaagcggatatcaaacggagaaatttcggccatttccgccgctctcgcaaaggagagctggtcatcatttccgaggccgggcgcaaatccgatttttatgccgcccggatgtgctttaatatcgccgagcagccgctttccgctttttatctttgaatccttcggaagagcgacggtctgccactcttttgcgattattgccaaaggcgtaaaatcagctgccttcagccggctttgtcccaaaatttcattgcttaacagcaggcttgaattcatactgatgacatccgtttttcgttcgtttacatatttccagccgctgtctccgcctccgccgggtttatagacgatctttacgggccggcctaatatttgcttccgctctattaccgattgcaaagcttttgccgttacgtcccagcccccttgaggcgccgccgggacgacaatttcaaccggcccttcagctgaacggatgcccgccacctgccgtccgtcaaaagaaaccagcgccgccagcatgacaagaagcactcccaaccgcttcatttctcccatcccttattcatgtgctaaataatatttccgttccggcctgccgataatgccgtactctaattcagcgagcgcttcttcccgagaaacgagaaactcggcgtagcgccgcgccgttgttctggaggcgcccattttttcgcccagttcttcagccgtcatccctttttgggccgccctgagcgcgtttttgattttttgaagcgtaatcgaattaatcccggtcggcagatcattgagctgtttttgttctttctgaccgcttccgaaaaacatgtcgataacggactggctcagctccggctgtgagtgcagccattctcttttttcacggtactgcaaaagcacttctgtaaatttatgtgccgacaccggctttatgacatagtgggaaacgcctgatctgagcgcttcctgcagcagtcttgtttcggcagaagctgtaataatgatgatatcaacggaaggaaaacggccgcggataaggggaagcagatctgttcccagctcatccggcatataaatatccaaaagcagcagatcaggctgccgtttctcaagcagcgatatggtgtctttggcattgattgctttgccgatgacattgaatccatcaagatgttcgataaatttttcatgaatttgcgctattcgaaagtcgtcctctgcaatcgcgatgttaatcactccgattccccctttggcctttctttcggtataaacaccgtaaatacggctccgccgctcttttgctgcgaaatctctatcgatccctgtaattcactgacggcttctttcagattggctaagccgtatcctctccttgtcccctttgaagagtagcccttttcaaatatggtttctgttttttcctgaggcacgccatcccctgagtccgccacttcgatgacgatatccctgccgatatcagtcataaaaaaggcgacctcttttttctctttttcggcgacggcttcgaaagcgttatcaataagatttccgatgatcgtaatgagctgggatgaacccacatgttccggcagcgattctaaaaagctgttttcatctattgaaagcttcactttcttctcagacgcctttcccatttttcctaatagtatggcctgaacccgctgtgaatgaatgttttgaaagaggatttcatgctgttcattctggatggcgtactcttcttttatcagttcaatggcttcattatattctcccagctctaacagaccgagtatcgcgtaaagcttattcgagaattcatgcgtttgcgcccggagatcctccgagtattttttcatttcagtcagcttgttaatcagtttcttgagctctgttttctcccggaagctgatcaccgctccgtatacttgtccggtctgcttcatttctttcacgtttaagataaatactttatctccggcacgcacctccacgttcggcggtaattctccccctgccaacaccggcatgagatttgcgcccggcatgatttcttttatatgccttccgatcatcggttccggaagattcagcatatcagccgcagataaattcatcatggttaccgcgccttctttgtttacggcgataatcccttctttcatcgcaaggagcatcgcattgcgctccctgtacagtgctgcaatttcatgcggttcaaggccgagtgtatctttacggatgctttttgcgagcgccgccgctcccccgatgccgataagaaacaccaaacatgcaaaatagcctaaatgccgcagatgcgctttcatatctttttctatctcatcttgtaaaaactcgactgtcaccgttccgacgacttcgttatgatttttttcctccaaaataaccggggcgctcccccggacagccttcattccgtcggaaaccggtgacccgccgaacatgacggttttattttgcaaattttgattttctttcggaatactgcttcgggccgaatgaaatgcaacatgccctttttgatcagtgatgtagacggcgtgcgcgcctgcctgttctttcatttgttcaatgacgtctaactttgtaaaagcctcttgatccgcaagccggaacgcctcttttacgggaggcatatatgaaatggtttttgccatttgcaccgccagctgttcagcctgcttctggccttcctttaattgctgaaaggcaaatataactgtgagcgttccgatgacaagtattaataaagccgcaattaatccggcgattttcatttgcagagagacataaaaccgcttcgcttccaacacagcaccagccgtcctttcctcctaaaatcataccattttttaaatctttatttctcatttttgagaattttcgtgatctttttctcttgtcatttcttttaaaaagtgcagtctggtataatttccctcaagagagataagaaggataactttttataatcgctgcgcaaaaaaagactgacagaagccagtctcgggatgtttcacaacggacgtatattcagttgacaaagtgtttctctatgatggccgagatacatttgaatgacctgaaatatcaatcaattttcctttgacggccaggcgtccttcggttcttaccgccttgtcgcatgtgattaatgtaatctctttatcttttgtctcctgaattgcgtttgcttctatttctgaaatcatggtttttgatgttacagaataaatatagtcttttctaaagtcggtcatcacgatttgcgcgcctttttttatgtgtaaaagagggccgaacaataggttctcctgcttcagatggtggcctgccaacgggtagtttccctcgcccattttctgatccggacgcatagttgccgcgccgatcagcaggttttcattggttgtgccttttaaaatcggaaggtctaaatcgatgctgctgatggttatccgtccgattatcggttttggtttgcgattaaaacttgactgaactgtttccctgaaaccgggcggatgaatggattcaaaatcatagtccgcttttttcatgttatttttccgcgcttgttctgcggttaattccgattcaatttggcttttactgaggtacgcgatcaaacagcctttcatgagaggtgaggaaatgagaagcagcccggacaaaataagaacggcaatgatcatttttttaatcatgaagaaaattcctttcttgtacgtcatgcggtgagtatttggtgagaaatgattctctttttaaaaaagcacctgatcgattcttacatgatcaggtgcgataacgtctatctattccttgctttcttctttcttgatacaacagccgcggctccgccggctaatagcagcagaataccggccgtgaccggcatcataccgtccgtatcaccggttttcggcaggtttttgcctgtatccgagtgattggttttaccattggtatcagggtgatgcccgccttgattcgtttgatgattcggtgtgtctttcccaggtgcgggattttttaatttcttattagaaacgacgacctcaacggcttttgactgtcctttttcaattgtgaattcaattggtttttcgttcagctgatagccgtcaggcgcttttgtttcgataaatcgatactgcccgggcgctaatcctttcaccgtaaaccggcccttttgatccgtcttccataccgccggccgttctttgctgccgccagtgtttaccggatgtccggcagaatccgtgatcttgaattcagcaccttccagcaccttatttttatcgtcatgatccacttttgtcagtgtgacatcaccaggcgtcagtgtattctccgcactgatttcgactggttttatgtcgatatttgtgatcttgaatgatattggcgtttgatccaaactgtaaagttcaggcgcttttgtttcgataaattgatattcgcccgctttcagtccccgtacaataatttgtccgtgctcatctgtcgtcagaccctctgtcagtactttgccgtttgcatctgtcagattaaactttgcaccttgcaggactttccgtttgtcaccttgatccaattttgtgagaacaacgctgttcttgatgttaactgcagtcagggcagcctgattcggttttccgctgttctcagccttaatcgtaaacggcacaggggttgttgacagcagataaccatccggcgcttttgtttcaacaaattgatagtttccgggcgccaaaccgccggcgtcaattttgccgccttcttttgtcatcagatcgtctcttacggtttttccatcactgtcaatgattttaaattctgcaccgtctaaaacgtttccgtcttgatccttcttgatcagctggacagagcctttatagttgactgccgttcctgcgtcagttgactccggctttccttccgctgtttctgagatggtaaactcttttttctccgtatttaacacataaccgtcgggtgctttcgtttcaatgaaagcgtaatgacccggtgcaagaccggacgtttctacttttccgtccttatctgaaaccagatcttctttaaccgtttttccatcactgtcgacgattttgaagactgcaccttcaagcttcttgccttccgcatcttccttcgtcagccggacagagcctttatagttgacggccgttcctgcgtcagttgactccggctttccttccgccgattctgagatggtaaactccactttctccgtatttaacacataaccgttgggcgctttcgtttcgatgaaggcgtaatgaccgggtgcaaggccggatgtttttacttttccgtccttatctgaaaccagatcttctttaaccgttttaccatcactgtcgatgattttgaaaactgcaccttcaaggtttcggccttccgcatcttccttcgtcagccggacagagcctttatagttgacggccgttcccgcgtcagttgactccggttttccttccgctgtttctgagatggtaaactccactttctccgtatttaacacataaccgtcgggcgctttcgtttcgatgaaggcgtagtgaccgggtgcaaggccggatgtttctatttttccgtccttatctgaaaccagatctttctgaaccgttttaccatcctggtcgacgattttgaaaactgcgccttcaagattcccgccgtctgcatctttcttcgttaaagcggcttttcctttataattcaccattgatcccaattcaacatcaggtacttgattcttttcgttctttgcgattgagaagtgaatagcttttgtgtttacgataaaccctgatggggctttcgtctccatcagccgatagtatccggcgggcaaaccgtttatctcaactttcccatttttatcgctttcaatattattttttatcagagtataggtaccgtcgcttgattttttctcaagcttaaatacagcaccggccaaaggattattgttttcgtcttttttgataagcgtcaccttatttttttgatttatgactttatagagtgctcctgctgcggaggatttaccgtcaatcgtaacggagaccccgtttacataggcgtcgctgatggtgtagccgtccggagcttttatttctttcagtacataggttccgtaacggatattcccaaacgcaagtttaccggcatcgtctgttgtgcccgtacgaagcagctgcttgccgtctttagaccataattgaaagtcggctcctgaaagagatgttccgtctgatcctgttttagatatcgtcaggcttcccttctctcctgatcctgagccgccgccgcttgaaatggcgacaaacactgagctgttgttctcttgggtctgctcctcaacatttgtccctgatatcgacactttgttgctgacctgaccgctgctgccggaaatattaatgagagaacgatattgtatgacatacgcacggtcgatttgtttatagctgcctgtaaaggtgaggacaaatgattgttcaccggtggcattgtcagtttttatatctaatttatagtccttatctttttcaagcttcacatcacccggaataagatttccgctgctgtctttcataacgccgctctcattatattttgcttgatatactttaaaagaatcttcatctattatttgattctcatccggggtgtctttgacttttacgtcatccagtgtcgattggctggcattgacattgatgttccaatcgatatagtttccgttctgtttgccgcctttagaaatcaggtttcctccgtttgcgatggaaactgaacccgtcagcgttcggtctgcatggtcattattaaagtactctgctttgtttgtgtattgactctgtttaatgacctggccttttaatgacgttttaaattcaatcaggtatggtaaagcgtcatctgttttgagacgtacgattaacgtatttttgttgccgtctgacggctcctctatttcatattttgaaggatccagcgcctccccttcagtgatggagccgtttttgctgatggtatacgttttaacagcaaccgacccatgcaaaaattgctgaccatctgtgatcgtatcttttatataaggattttttgaaggttcgccattgtaattaatgccgactttccatgtgatttcttttgaaacggcgttgtatgagccgtttttgaatccgttatgggacgtctgattgttcggtgtgaagccgctcgattccttatttgtgcgtttgccgccgtttttatccgtccatgtcgactccgccgtattcttaatgggttcgtttgaaaagtcagcgttgaattttgtcttatacgtgatcttaaactgactgtttgtttctgcataatccccgatcaatgctattgtaaagccttgatttccgggtttttttgttaatatatagtctgttccttctttcagcgttttgttatcagtcgtgtcttgcatgtgaaatgaatcgtcaatgagcgccaggcctccgctggtgaattgatcatccagcgtccagtctttcattgtgtaaccgtttttattaactgtgattgtccaatcaaccgtcttcttctcatagtctgcatttgaataatttttgatcagattctgctgaatggcggttcccggagtttcctttgattcccctgtatctgtcattgctgtattggtgtatttgacaggactgtcaataatgaccccatcgttgacttgagattgataaatgatcttatatgctcctgtgacagtttgcttgaattttatttcaaagccgttcccgttatcagtcagcgtataatcctcaccctcttttaatggggcgccctcttgttcactgccgttctggctgaatgtaatcggaaggactttcaatgaaccgggaacaagatgcagatcgtctgatccgaacgtatccttgatgccggctttggattgatcaatctttttctcaccgtagttgtacataacagcccagctgaacgtttgggattctcctttataacctgtcgaagatttttctatcatttttccgtaacccgctgttacggaagcttccgcagaaattggctccgcattgtctccgctgaatgccgccttgtttgtcagcgtgatgtttccgcctttacccggctttgcctcatctttaatttccgtgtcatatatgagccggtaggctgaatcgatcgtcccggcgaaggtgacattaccgttttcgccaacggtataacctgaagttatctcatttccctgactcaccgagccgtcaatattcacatcaagttcatacactttcacagagcggaaagtcaattcgtccggaaggctttcagtcaatttcgcatttttaacttcttcttcctttttattaagatcaaccgtccacgttacctttccgggattaatacctttatccaatgaccctgatttctcaatggttttattgacattcggtttaaaataaaccgttacgtccggcgtatcagagttaaccggaaacttaatcttttgtgtggttgatccttttatttctttctgattgaattgggtgtttacatacaatgaccccttgacgttagtatcttcttttacctcgccgttaaacgtcatgatgacatggccgctcgtattaatggaaaaagttccgtacgtactatcgccgtcggtcaatggctggttcgtaatgtcattatgcatgataaattctttaggcagatcaaattcatatcgatcaccgtcgtttattgttttccccagctcattcggaatcgcccattgaatggtgatatttgccggagagttcgtattcgcagggttgtttttgtcatatggttttcctttttcatccgtcaatttcacatcagttaaaatattttgcgtaatccggcttccgcctgattgaaggcttttagcggcagatttgcttgaaaccgccatttttgattgactgcgtttagcagaaggttttgatttcgttttctgttctgctttatcaccgccgtccgcagatgctgattttttctctgtcttttcctgaggttcagcaggtgttgaagaggtgtttttttctgtttcggaatccgttgttccgtctttcttcacaggtattaacacctgctgggtcttgccggcatccagttgaaaaagagcttttgccattttcgtctcatctgttatgtcgggagtaaacttcgccgacagtgtaatggagcctttggcatccccggcatctgcttcagcatcgttcactttcacttccagcgtgctgctgtctgcttcagctttatatataccgatcacccgatcagctgatgtcagctcaccttcggcatcgttatctaatgtaaaactttccggaatctttaaggtgatattccggtcacttgcatcttccttgttttttagcgaccattcgtatgtcagtgtcactttatctcccggtgctaaagcgggctcactcccttttgacccgtcaacagtctgctgtctgccgtctttgactgcaactgaatcaaagaacccgctctcgctttgttgtgatccggaagcggctgcgatcggagtaaagctgacaacttggctgaagatgaaaaacagcgtaaagcatgaaattaatgccgccctcagccttttgctttttttcgggctgaacgaaaagttcctcactcccaatgtcttattcctccccttttatatagacttacgttcgaacaagccggtaagcatgggattctccttatccgaaccaaactacattgtatgaaatcggcctatacaaattctgtacatgggattatttcagaaataacgcacaaaaaaagaccggcatcagccggtccggtcattcaatcgtcaattgattttatccttcaattgtttatagcgttcgtattcctttatcgcctcttctacctttcccagtttattaaataactgcagtttgtattgtataattttatcgtcaccgggctctattttctcaacctgcaggcaaacatccatcgcttgatgatcgttcttctcttggatgagaaaaccaatcagttcgtacgctttgctgagccacagatgggccagacgcgctttttccggctccgcccacagatagccattctccatgagataatggttctcatatgacatgacaatgtccaggtgccgggttagtgcagctgcgctgaccggaggagcctcttttaatgttttttcccattcaactgtatcaacctttactccggaaagccggagaatgtatcctatatcggtattttctattgattggctgaagggcagctgaccgattaatttccgtatttgatatattgtcgaatagagctgggtgcttgcttttgatacatcataagcaggccaaaacatctccatcagcatgtctttactgaccgtacgcccttgattaagaagtaaaaatgcatacagttcacgggctttggatgttctccacttgactgttatgtatgttttgacaccatttaccgattgataaaagtccaggttcccaaaacattgtataacataatccgtcccggtattctcgtctgccgacctgagttttttattcattcggattcgctcaacagttgtcagcagccgggcatggtcaaccggttttaaaagataatcgacagcatttaattcaaacgctttgatcgcgaattcattataagcggtgataaaaacaacttggatattttcattgacctcctgaatcgattcagcaagctcaataccgtttatcacgggcatttcaatgtcaagaaacaccgcatcagctgctgaaagctccgaatgctccagaacttccgccggatcttgaaacgttataatagattgaaatgcgtttgtccgctcaagcatacgattaaaatgaagcaatgccagttcctcatcatccacaattaacgctttcaaaccgcatcccacccgtcaatatagatatatctgaaaataatttcaattataccatgcctaatgccctatatagttggattctttttctttctcttgttgtatcataacgtttgtgattacaatatttatacattacataggataatagaatgcccctgaatgggataaaggagtaatgatgtgaaagaaaaatttatttcgatttcgattatttgcggctacgctgctttctttatgctttttatggtcctgaatcatttttcaggatcatccctccctcaagcggaacagggcgtgatcaatctggaaaagtgggattttcaaaaggatggaaatgtccagctgaacgggaaatggattctatatccaaatcagatgctgtcaccgcaggcgcttcattcagcaaaaggaaaaaaccccgtactcgttgatgtccccgtcaatgtgaagctgttcggcaaaacggccgatgtggattacgggacgtacaaactgacaatccgatcaaatgaagacaatcaggttttggggatcagcacatcttatatctacagttcaaaccgcctttatcttaatgggaaattaatcggacagagcggcaatcctacagaaaaagctgattttaaggcgcagaacaaaccgtacagcagctttttcaggcttcacaagggtgacaatgaacttgtcctgcatttttcgaatttcggaaaagttcccggctgggggatcgcaaaaccgataacgtttgggactcaggaacaaattatacgcgagaatcaaatttccttttttaatgattccattatgattacggcttttttcattaccggtttatattttctcggcttttttttgcaacggacaaaggataaacatttattgttcttttccgtgatgtgtctgcttttttctgccattattcttatgatagggaaagaaagaattatctttctcctctttccgtctatttcattttcattgctgaattccttgcgtatcatctcaaccgtgcttgtcagcatggcggtttttctttatctcttttatgcatacagagaaattgtttcaaaaacgacgatcacctttttaaccgctttatccgggattatcttgatcactgattttatgtccggaagtttcattgaccatctctcatacattttacattctgtgcttgccgttacgactctgttttatattacatatatttttacgattgccgccataagaaaaataaaaggaagcacgtaccttacactcgcatccgtctcgatgagcgcttttgtgattcttactaccatttcagcttacagcggcaaaacggctttttcttttaattcgctctattcattgccgacagtcatcgctttattggcggtggttcttctgatggcgcagcaattcgccggagctttccgggacaatgaagtcctctcacggaaattagtcaaaatcgaccaactgaaagatgaatttatcgccaaaacttcacacgaattcaagacgccgctgaacagcattattaatatatgccaaacccttgtagccggcagaaaaaagaagacgatagaggaagagaaagaaaatatgcagctgatcatccgtatgggctacagactttctgatctcgtaaatgatattcttgacttggaaaaaatgaagcagggtatgctgcagattcgtccggttcccgtcgatgtgcatgccgtcatatgcagtgaaatgaacttctaccggcttttatccaaacataaaaaacttgccattcttaatcatgtgccggacggcctccctttggtgcttgcagatgaaaaccgattccggcaaatcttaaccaatcttgttgaaaacgcaatcaagtacacatccgaggggaacattattctttctgctgaaagcctgaatgacaaaatgattcaaatcacggtggccgataccggcagcggcattcctgaggctgatcttgaaaccatttttgattcttttcagcaagcgggagggacggaagaagatggaacgggtttaggtttaagtattgtgaaacagctcgtcaagctccaaaacggggacatctgggcggagtcagcggcggcgcaaggatcagcctttcattttacgttacccgccgctcaaattgattctttaccggaagcaaagaccgaacttcctgaatcacatcccgggcagagaatgtcggatatttcgctggtcacgccttattactcagaaaaaatcgatgctccgacgattctgatcgtcgacgataacatcgagagtttgaaaattttaactgatatgctggaaggtgttccttataacgtaatcgcagtaaaaagcggaaaagaggcgcttcaagctgtctcttcctcgaagcttgacttggtcatattagacttgatgatgcccgacatgacgggttttgaagtctgcacaaacatccgcgaaagattcagcatggtcgatctgccggttcttatcgttacggcagccattatcagccatgacaaatacaaggcgtttcatgccggagcaaacgacatcttacaaaagccttatcattactctgaattcaccgcgcgtattaaaaatttaattttgatgaagcatacggctcaccaagccacaaatttagaaatggcatttcttcagtcgcagattaagcctcattttctttacaacgtattaaatacgatcatcgcgctcagccatttggatattgaaaaagcacgggaaaccactgctgcatttacaaactatttaaggatgagttttgattttcaaaacacttcggacatcagctcattcagaaacgaactttctatcattacgtcatatctttctatagaaaaaacacgcttcggcaaacggattgatatcctttttgatattgaacaggacattgacttcccccttccacctttaatgatacagccattggtggaaaacgccgttcatcacgggatcagtaagaaaagaggcggcggacggataaagctgacagcgaaaaaacaaggcgaaaacacgtattttatcaaagtggaggataatggaaccggcatcatgccggacatacagaaagatattttgtcttctgatgttaatcgcagtgtcggcctgaaaaatatcaatcggcggctgaagcatttttgcggaagcgaattgacgatcaccagcaccccggatgagggaaccgctgtttcgatgatgattcacactcccggcccaacggatgatttgatctcactaaaaacgtcttcattaagatactgattaacttcaaaaggcatgtaaatacttctgccggctgtcgggaaattcccgtcagcctttatttacccaaaaagacgcaaaaacaaaaaagcttgaagaaaaagtgatatcttctccaagcttagatgatccgcaccagtctggccgttttcacttaagaaatcgtaactcccgcgcttgcatatcccgccactgtattaataagcgaaaggcctgtcgcagtggcggagaataccattaacagccgggtttgaggagttaccgcaatgttcagccctgtcgtgattccgttgctgatgctgccgattgacaatatgccggtgaggggaggagctaaagtgacggatgctccggggatcggcgtgaacgtattgttcggcactgtggaactgtataattgtgcggttatcgtaacagtcgagccgacaagcgacaatgctgcggttgtactgaaataggcggcaattgatgtaatggttccgcttctcggagccgaaaaagcaaagttcagcagagttcctccagccccggtaagatcaattgcacctccccctccgacattgacgcccgtcacagaattgccgaagccgacaaggctcaccgttccgattaatccgccggcaatggtcgtcacggcagttggaagacctgaagcatagggaatgatcgcgcctgctccggttactcccgttaccccggttgctccagttgcgccggttactcccgttaccccggtggctcctgttgctccagtcgaacctgttacccctgtggctcccgttactcccgtggcgcccgttatcccggtggctccggttgctccagtcgaacctgttacccctgtggctcccgttactcccgtggcgcccgttactccggtggctccagtatctccggttactcccgttaccccggtggctccggttaccccggttactcctgttgctccggttaccccagttgctccggttactcctgttgccccggtcgctccggttactcctgttgcgccagtatctccggttactcccgtggctcccgttactcctgttgctccagttgcgccggttactcccgttacccccgttactcccgttaccccggtggctccggttgctcctgttgccccggtggcgccggtgagcccggttactcccgttatcccgattgctccggttactccggttgccccggtggctcccgttatcccagctgcgccggttactccggttgagcctgttactcccgttgctcccgttattccggtcgatccagtagctccggttaccccggttgctcctgttactcccgttaccccggttgctccggttattccggtggcgcctgttactccggttgagcctgttactccggttgttcccgttactccagttgcgccggttgctccggttgctcccgttatcccagtggctcccgtatccccggttacccccgttactcctgttgagcctgttactccggtggcgcctgttaccccggtggcgcctgttaccccggtggcgcccgttattccggtcgctcctgttactcccgttaccccggtggccccggtaatcccggttgctccagttactccagtatccccggttacaccggtagcacctgttactccggtgagcccggttgctcctgttaaccctgttgctcccgttacaccagtggctcctgttactccggttgagccggttactccggttgctcccgttaccccggtctctcccattattccagttgcgccggttactccggtcgctcccgttatcccagttgcgccggttactccggttgttcccgttaccccagttgcacctgttactccggtcgctccggttactccagtggcgccggttactccggttgctccagtatccccggtcgctcccgttaccccggtggctccggttattccagtcgcgccggttgctccggtcgagcctgttactcccgttgctcccgttactcccgtggcgccggttgctccagtcgcgccgggatctccagtgacgccggttaccccagtcgctccggtattcccagtcgagcccgttgctccagtgaatcccgttgctccagtaaaccccgttgctccagtgaaccccgttgctccagtcagccctgttgctccggtcagccccgttgctccggtcagccccgttgctccggtcagccccgttgctccggtcagccccgttgctccggtcagccccgttgctccggtcagccccgttgctccggtgaatcctcttacatgaaaatgatttggatgacagcatggacaccatctttcatgacagcaagaagttttgcaacagaattcttcacagcaatgggcccgattttgataactgcgcctttgatttcttcttttatgttgaaaatgacagcaacactcattactattccggcagtcgtaatcccaagagtcgtatctgttataccaagtatctccttttctcattacaccacctctatttgcataatatttccacaacaaaaaaaggtgtggcaaaatcccacttctattgggcaaatttttaaatgttctttaaggctgcatcatgcagcatttacagaaaaaaagacctaactttgcataagtcaggtctttcatctttaaaatatcagactgctattttcatgaggttgtcggaaaacttatgctgttaaaatcgatattgagagcagttgctgtcgttaaattattagcagttgtgaagataaccctgagctggtaagtgttcgttcctgcggtcggcgcagtatccactactgtatcagcaatcgaaaaactatccgtagctgcgatagtactagttcgcgacagagttcttgtatgaatttgcactgctcccctatataatctcacttcataaacaaagtttgaattggctgcagttgttaacgcgacactgagtgcataatcaagctttacattctgcaaagcattaaccgggactgccagcgtagcaacgggaacttctgtatttaacggcggataaacagtgagcggcccgttggttcttgtgaagagcaaggttggtgtactgcctgtggcgccggttgggcctgttactcccgtggcgccggttgggcctgttactcccgtggctcctgttgacccggttgctcctgttactccggttgggccagttgctccggttggccctgttgcgccggtcgatcctgtggcgccggtgagcccggttgctcctgttactcctgttactccagttgcaccagttgctcctgttactcccgttgctccagtcaagccggttatgcctgtcgatccggttgagcctgttggccctgttgcaccggttgggcctgtcgctccagttgaaccggtcgctccggtggctcctgttactcccgttgcaccagttgctcctgttactcccgttgctccagtcaagccggttgggcccgttattccagttactccggtcgctccggttgagcctgttggccctgttgcaccggttggtccggtcgctccagttgaaccggtcgctccggtagctccggtgagcccggttgctcccgttactcctgtggctcctgttgctccagttagtcctgttacaccagttattcccgttactccagttggaccagttgctccggttgaacctgttacccctgttgccccagtcactccagttgcacctgttgatcccgttactccggtggctccagtcacacccgttgaaccggttgggcctgtcgcgcctgttattccggttgtaccggttgggcctgtcgcgcctgttattccagttagcccggttacaccagttgcgcctgttgctccggttgagcccgttattccggtcgctccggttgaacctgttatacccgttgctccagtcactccagttgctccggtttctccagtcggtcctgttgatcccgttactcccgttgaaccggttgcaccggttgctcccgttgccccagttactccggttgagcccgtggttccggtttctcctgttgatcctgttgcgccggtttctccggtttctccggttgaacctgttgctcccgttgctcctgttggaccagttgctccggttgaacctgttacccctgttgcgccagtcgctccggttatccccgttgacccagtcactcccgttacaccggttgggccggttgggccggttgagcctgtcgatcccgttgctcctgttacaccagttgatcccgtgaccccagttgggccggtttctccggttgaaccagttgaccctgttggacctgttgctcctgttactccagttgatcccgttgagccagtcgcgccggtttctccagttgggccggtttctccggtcgaacctgttacacctgttgggccggttggaccggtctctcccgttgggccagtttctcccattgcaccggttactcctgttgctccagttacaccggttattcctgttgaccctgttacaccagtcgctccggttactcctgttgaccctgttacaccggttgagccagtcgctccggttataccagttgcccctgtcgctcctgttgaaccggttgcacctgtgactcctgttgggccggtttctcccgttgagccagtcggtccggttgaaccaattgctcctgtcactccagttgcacctgttatcccggttgagcctgtgaccccagttgctccggttgagccagttggtcctgttacaccagttattcccgttacaccagttggaccagttgctccggttgggccggtctctcccgttggaccgatttctccagttacacccgttgcccctgttgggccagttgatcccgttactccggttgcgccggtttctccagtagctccggtatccccggtcgagccagttactccggttgccccagtcactccagttgcacctgttgatcccgttactccggtttctcctgtcgatcctgttgctccagtcactcccgttggaccggtcgatccggttactcccgttaccccagtcgctcctgttgttcccgttgctccggttataccagttgggcctgttgcgccggtcgctccggttatccccgttgcccctgtcgctcctgttgaaccggttgaacctgttactcctgttgagcctgttgctccggttgatcccgttattccggtcgctcctgttgcaccgattgagcctgttgctcctgttatccccgtttctccagtcactccagttgctccggtttctcccgttgctccggttgagccggtttctcctgttaagccagttgggcctgttgctccggttgaaccagttacaccagttgggccggttactcccgtcgccccggtttctcctgttgctccagtcactccggttgagccagtagctccggtatcccctgtcgagccagttactccggttgaaccagtcactccagttgcacctgttgatcccgttactccggtttctcctgtcgatcctgttgctcctgttattccggttgagcctgttgatcccgttggaccggcctctcccgttgggcctgttgatccggttacacccgttaccccagtcgctcctgttatccccgtcgcaccggtttctcctgttacacccgttggacctgttcccccggttgcgcctgtttctccagttaatcccgtcgcaccagttgagccggttgcgcctgtcggtccggttgcacccgtttctccggttgggccggttgagcctgttgggccggtttctccagtagctccggtatccccggtcgagccagtttctccggttgcaccagtcactccggttgcaccggttgaacctgttgctccggttgagccagtcgctcctgttacaccggttgggccgattgatcctgttggacccgtgattccggttgggcctgttattcctgttgctccggtttctcctgttggccctgttgcgccggttgggccagtttctcccgttgcaccggttacacctgttgagcccgttacaccagttggacccgttactccggttgagccagtttctcccgttgagccagttgagccagtcgcgccggttgaacctgttactcctgtggatcccgttactcctgctgggccagtttctcccgttgccccagttactcccgttgctccggttactcctgttgctccagttgctcccgttgctccggtcgctccggttgagcctgttgatcctgttactccagtcaaaccggttgaacccgtggtcccggttgctcctgttgatcctgttgagcctgttggccctgttgcgccggttggtccggttggacccgttaggcctgttgtacctgttgacccggttgcgccagttgcacctgttattccggttgagcctgttgggccggtttctcccgttgaaccagttacaccagttgagccggtttctcctgttgcgcccgttgctccggttggaccagttgggcctgttgcaccagtcgaaccggttgttcctgttactcctgttggaccggtttctcccgttgccccagttactccggtcgctccggttactccggttgaacctgttactccagttgatcccgttactcccgtcgctccagttgctcctgttgaaccagttacaccagttgggccggtttctcctgtcgccccggttactccggttggacccgtgattccggttgggcctgttattcctgttgctccggtttctccggtcgccccagttactcccgttgctccagtcacacccgttgcaccggttgggcctgttactcctgttactccagttgatcccgttgcgccagtcgctccggttgaaccggttacaccagttgcgcctgttgagcccgttgcaccagtcgttccggttactccggttccacctgttgcgcctgttgagccggttattccagttataccagttgatcccgttggacctgtttccccagttacacctgttgggccggttgggccggtttctccagttatacctgtcgccccagtttcccctgttattccggttgtacctgtcactcccgttggtccagtctcccccgttggaccggtcgagcctgttattccggtcgctcctgttgttcccgttctcccggttacacccgtgaccccagtcgatcctgtcgatcccgttactcctgctgggccggttactcccgtcgcaccggtttctcctcttgctccagtcactccggttgagccagtagctccggtatccccggtcgatccagttactccggttaccccagtcactccagttgcacctgttgatcccgttactccggtttctcctgtcgatcctgttgctcctgttattccggttgagcctgttgatcccgttgggccggttgatccggttacacccgttaccccagtcgctccggttgttcccgttgctccggttataccagttgcgccggtcgctccggttgagcccgtggttccggttactcctgttggccctgttgcgccggttgggcctgtcgatcctgttgcacccgtttctccggttgggcctgtcgatcctgttgcacccgtttctccggttgggcctgttgagccggttgggccgatttctcccgttacaccggttgcgccggtttctcccgttgccccagtttctcctgttgggccagtttctcccattgccccggttactcctgttgctccagttgcaccggttgggccggttggaccagttacaccattcactccagttgcaccagtttctcctgttacacccgttggacctgttcccccggttgcgcctgtttctccagttaatcccgtcgcaccagttgagccggttgcgcctgtcggtccggttgttcccgttcccccggttacaccagttaccccagtcgatcctgttgctccagttactcctgttgggccagtttctcctgttgatcctgttgcgccggttgggcctgttattcctgttgctcctgttgggcctgttattcctgttgctcctgttgggccagttattcccgttgcgccggtcgccccggatgcacccgtcgctccagtttctcctgttgaaccagttacaccagtcgctcctgttggaccggtcaagccggttgggcctgttgcaccagtcaagccagttgttcctgttactccagtcactccggttgagcccgtagttccggttgctcccgttgcaccagttactccggtcgctcctcttactccagtcactccggttgagcccgtagttccggttgctcccgttgcaccagttactccggtcgctcctcttgctccagttactccggttgagccagtggttccggttgctcctcttgctcctgttacaccagtcgagccggtagctccagttactcccgtcgcccctgttactcctgtcggaccagtcactccggttgggccggttacacccgttgatcctgtcgacccgattgagccggttactcctgtgggacctgttactcccgtcgcccctgttactccggttgatccagtcattccagtcgacccagtcgctcctcttgctccagtcactccagttgagcccgtggttccggttgctcctcttgctcctgttacaccagtcgagccggtagctccagttactccggttgctccggtcgctcctcttgctccggtcactcctgtggggcccgtcactcctgtgggacctgtaattcccgttacgccaggttcacccccggtttgcgccaatgaaacatcgtctattaaaaccgttccggaagaaactttacttactacaatgacggcaaaggccgcgccagaaggcacagtacttgttttatagatttcagaccatgtgtgaaagagcacgttcggcaaatttccgggtgtaatattttcttgaatggaactgatttgttcacctgctgcgctgacatatatgatctggagagtgacttggggacttggctcatttccgagcgttgcgagtgatacgaatagagtcactgacttggctgaaatgggaacgatttgactgaggtaagcatatggctgagctccaataaattgcgcagaatatctccctgaatgtgcaaacaaactgttaatctgggtatttgccgaactccaccccgctaatgtgccggtttcaaagcttccgtttataatcggattattcattcaatctttttccctctccttcccgttgttgaccgtcttacttattaagacagcatattaatacgggctgtgttttgacaatctaaataaaaaaggtgatttcttttcatcaccttaatccgatccttgaatggggaatcccgtcgcaatgagggagcggtttgccgctgcgacttgtgttacgtaattcgaagaaaggacggataaatagagctgatacgcggctgtttcatccgccttcatttcgtcgatgtacgtaaaaggaattcctatgatttgcccgcctgaagaaaagaggttccgctcttgtctctgtgtttgtatcgatacgccatttctttgcagctcgagagctaagaccaatgagaaatgagacgcgagcggatctaattccacatttacttgtatgacggcatccgttttcaccaattgatctgtcggcgcggctatcactgtgcttaacacgtttatcggtgttccttctaacggaatcatcatctggtctgctgtattttgaaaagctacagccggaaccgctcccggcggcccctcaggccccgggggaccgggcggacccgcctccccttgcggaccgcgggagccggcgggtcctcttttgccttcgggacctcgcagcccgggtacgcacaaggcagatcgattttcatctgaagacggaaaccgtttttccgtccctgtttccggcctttcatgttcacatggtaattgttcataccggtgtttcatatgtctgctcatatatttgtaaggtttctgtttcaatatcatgtattgattacggccgctgctcatattatcaccccggccatattctattcgcactggagtcatcatgtgcaggcccttccccttccttacagaaataaaaaaaaggcagacctgagtctgcctttttttcttctaccataaccctaatactttccaccataatccgccgatcacaagccatgtcacaatatggacgattgacaggataaagccgatggaccaccatttgctttgcgatatataacccgctccgaaaaagaccggagctgctcctgagccgtaatgcgtcgtcgaaccgaaaaggttgctgaaaaacgccaggctgagcgccgccaacagcggcggagcgcctgccgccacgatgacggcgagaaatgccgcatacatggcgctgatatgcgcggttgcgctcgcaaagaagtaatgcgtgtaataatacacgacaatcagaatcataaatgccacaatccatgaaaaaccggaaacagaagatttcatcatattgctgaaccaagacaccatgccgagctcattcaggaaattcgccagcatcacaagcgccgcgaaccaagtcagcgtatcccatgcaccttgttcctttttgatgtcctcccatgttaatacctgtgacaaaagcaaaacggataatccgatcagggccgtcgtcgttgcgtcaatatttaagcttcctccgaaaatccacagcgcaagcaccaatagaaagacaatgaccatggagagttcggattttttaaacggacccatttctttcaatttttccgttgcgattttagccgcatccggtgtttctttaatttccggcggatacagcttataaatgacgagcggcgtaatgattaagctcgccaatcccggtacaatggctgcgattgcccagcttgtccatgtgatgtccacccctgcgacatcgtgggccagcttggcgatcagcgggttcgccgccattgccgtcaaaaacatcgcagacgtaatcaagtttccttgaaaaccggtttttaataagaaagcgccgattttccgctctgttccgtctgccggcgttgatccgaaagtttcggataatgatctgataataggaaaaataatgccgcccgcccgtgccgtgttgctcggaatggcaggtgataaaattaaatcactgaaaagcagtgaataagaaaggccgagtgttttcttcccgaaccgttgtacgaatacgtaagaaatcctggcgccgagcccggttttgataaatccccgggaaataaaaaaggcgatgacaatcagccagattgtcttgtttccaaatccgcttaacgtattttcaatagatagcgttcccgttaacgcggtgactgccaatgcaaaaattgcaattgcgcccattggcaagggcttggagataaagccgataattgttgcgacaaaaatagcgaacaaatgccatgctttaggttcaagtccggacggcgcgggaataaaccaaatgattaatcccacagcaacagtaataagcaaaggaatgatttttactgcctgctgtttttttgcgtctttttctgaagccattacaggtctcctcctattttgttgtcttccatcccctatcccattttactacttaactaagttaataaacgtttttgttaattaaaaaacacaaaggaatattttcctttgtgtttcttgtttcttattttaatatgcccgacccggctttagatataacatctgattttacatttgatgatgagccgatggaaccgtgcaatgacggtgtccagccgacggactgacttaatccgttggcggccgacgcgttaatggaggagccgtttaaaagagtgccgtcttcatgaagcgcttttccgccgctgaagacgctgatgactttatcagcagccagtcccggcacttcaaaaacattattctgggcatatatttttgacgcgcggcccgcgccccacgcatagctgaacgggtatgcagcgcttttcgagcctgcgtaaaaattattataaatatgaacctgcccgtaccggacccgcggcgcgcgctggacgatgttctggtaatagttatggtgaagggtcaccttcagttttccctcatccgacgtcttgctgtcgctgtttccgatgacggagcctttgtcatggtcatgatatttattataggacaatgtaatataattcgccccgttggctatatccgtctggccgtcatggtgctgatattttctcccgtaatagtagggaaaaccgctgtcgggattcgatccgtcattaaaggtgcaatgatcgatccagatgtgcgtcgcgccgttaatggtgatattgtcatattccgagttccagttgccgctgctgccgtccgtcgggtcccattgcggaaaatagtcgtaagcgtcttgaaattcaatgttgcggatgatgacattgtcgacaccgttcttaatattaaaattcccgcctgtcactttggcatttgaacccgagccgatgatcgtcgtatttgaaggaatgtcaaccacgacccgtgccttctggtttttttgcgatcgctgtctggcgtcttcctgggtgcctgacggcgctttttttccccatttgtccgggtcgtacgccttcagataggcgttcggatcatatgccggatctttataatcatcaaagccgagcgttttattgcggtcgtccgtattcatattgattgtgccttgtatgtaaataatcttcggtgtgctgttggcgcttccccctaatgcagaaacgagctgctgtctgtttgatacggtgtatacattcgatgaagaggctttcgcgccgccggttgtcccgccggaagcggctccccagccgtcatttgttcctaacgtctgccgtcccagatcagcggcatagacgtccgcagggatcatacataaacaaaccgccagcataaataacatttttttcatgaattgtgctcctcctgattctttgttccaatttattacagatgaattgtatcaaatcagttgagaaacagcaccgaaaatgtacagaatgtgccttttggttttattgcggaaaccgcaaaaaaatcccaaggggccgaaaaccccttgggatctgttcagcttacgcccatgattttactttttcgttatccgtgacaaacagaagaacttttccttcatctaagcgcttttcaaattgtgatgcttcctcttccgaaaagccgatttcgtgaattttgttgcggagctcgtcgccttttttattaaacatattgccgactgcgtgtttaatgcccgtttctttcgctccgatggtattgacatcagtgttatcggccaggcggtccgttctgtcgtcatcatgtgaaagcacatatacgtcttcttttgcgacacccaattgctgaagctcttttacgtcctgcatcagtttttgatcatttgtatattctcttactaccggtttcattgataagtcctcccttttgttttgtatattggatgtttacccgatcaatcaaggatcaaacaaaagaaagagagttcagtgggaaaacgggcagattgtcggtggatattttctggcgggacatgttacagtagaaaaagcaacttttatcagaaaaataaaaatcttcttgagccgattaagcagggaggtggttcctattcattacttttcaccggaacagcgatttaacgcttgggttgtcagtgatttagtgaagcaggtattccgccggcatacccgctgcccggatggaataaaagagcttacggcctttgctgaagatacttttcatattaatatcgatttcgttttctctatcattatcaatatcggtgatatcgaatccgttctgccggcagaaattgaaaataggctgggttcttatctgaccgcgcttcagcccgtgattaccgctgacatgcttcattcttcaaaaacgaatgcctatgaatatttggaacatgagaaaaacaccgatgtgtatcggttattctattaaatatgcatataaggaaagaagggccctggtccttctttttttatggccgctgacggtttgattttgtaattgggaaatggttcgtgttacatttggaacaaccacttatcttgaaggaggattcagtatgccgaatcatcagcagcaaattcaattggcaagacgccccaaaggcgttcccgcccatgacgatttccgctttgaaacgattgccgtgcccgaaccgaaagacggcgaagtgcttgtgaaaacgagttatgtgtccgttgatccgtacatgcgcggacggatgcaggatacaaaatcatatgtagagccgttcgctttagatgaagccataacaggcggagtgattgccgaggttctgacagacggcgataagctgaaaaaaggagatgttgtgatcggaaatctcgcgtggcaggaatattcagccgtcaatgagtccgccctccgcaagttggatacggatatcgcacccgcccaggcgtatctcggcattttagggatgaccggactgaccgcttacttcgggctgctcgatatcggccgtccgaaaaaaggcgaaaccgtcgtcgtttcaggcgcggcgggcgccgtcggctcaacagtcggacagattgccaaaatcaaaggcgcgcggattgtcggcatcgccggatctgatgaaaaaattgcgtatttgaaagaggagcttcaatttgatgaagccattaattacaaaacggcggatgatattcaaaaagcgctggaacaggcatgtcctgacggcgtcgatgtctattttgacaatgtcggcggaccgatttcagatgcggtgataaacctgctgaatgaattcgcccgcattccggtatgcggagcgatctcatcgtacaataccgaaagtgaagaagaagacatgggcccccgcgtccagccgaagctgatcaaaacaaaagcgctgatgcagggattcatcgtcagtgattatgctgatcgcttttccgaaggtgcgaaacaattggccgaatggcttaaggatggaaagcttcattatgaagaaacgattacggaaggattcagcaatattcctgacgcattcctcggtctgtttaaaggagaaaacaaaggcaaacagatcatcaaagtcagtgatctaagttaacatgatgatgaaaaaaggagggctttgtcccctccttttcttttttttttcggatcagccgcgaagaatcaaagtaagaaagccgtcttcatcaggctccgtatcttccaaagtgaatcctgctgcttgaaagcaggctaaactgatttgattgtctttttcgatgcttgccgcccattcccgcacgctggtaaacccagggtcagtcagcagtttttgcaagatctgttttccgtacccttgaagctggtacaaaggattgacgatcaatccgatatacgcccgctcctccacaaactctatagagaccatgcctcccggaagctgcccgttatatgccataaggacagtatcgtcttcatctttactcaatcgtgcataccacgcgtctaatggcagcatcgcatccattctccgtctgatgttatcgtttttaaaccagtgttcaagtattttcagctcacgtaccttcaatatttgaaatctgtctattgacaccatcttcccgcccccgcctgaaccttttctattattttacaacaaaaaaacgaagggcttcccgccctccgtttcttatttctcagataattttccgcctgaataaacggcctctttcagctcaattccgagtgatttggccatttttttcaatttggattcttccatcggcgtgacaaggctgagtacggttccttctttaccggcccgccccgtccggcctgatctgtgaatgtacccgtcttcattcgggatgtccgcgtgaatgacgtacggaagatcatcgatatcgagtccgcgcgccgcaatgtcagtcgccagaagcagcggaaattctccccgttcaaacgctgataatatctttgcccgctccatttttttcgcttctccgtgcaggatgccgagatccacatggtgataggcgagtttttccgcatagacgcttaaatttccgatatctctgacgaacacgagcgcctgcatgccgttcagccgtgacagcttttgcaatagcttcactttatcccgctgatcgcagacgagatattgatgcgtgacgcgcgctttttccgccgtattccgctccactttcaaaacggccggttcgtgtgcgatggtattcagcacctgttctgtttccggctgcagcgtagcggaaaagcttaaaagctgtcggtctttcagcgtcgttttaatgatttttttcatcgtttcgcggtgttcctgtgtcacgagctgatccgcttcatcaagaacgatcgtcttgacttcatgcattttcagctttttcgcctgaatcaattcgagcaccctgcccggtgtgcccgcaatgatatgcggtttatttttgagcttttccacctgctttttcacgtttgctccgccgatcaaagacaaagcgcgaagatcagagccttttatccactcctgaatcacttgaaaaatctgcatcacaagttcgcgggacggtgctaaaatgatcacttgcggatgtttctgttccgggttgatccgctccagaaccggaagcgtgtacgccaatgtttttcccgttcccgtcggggattcggcaatgacgtctttcccttccataatcacctgagcggctttttcctgaataacggtcggctcctgaaaacctgacgcctcccagttttcggcgataaatggttgtgtatgctgtaaaaatggccatgtttgggtcatgtcgttctcctcaattcttaaaatctactccatagtatctcaaatgcaagcgccaaacgcaattttctttttccttccaagccttttaacaaacggtctcctcctttataatcataaatgagaaagacacaagataaaaaatgcgtgtctgataacgatagaggtgtaatgatgagtattttatccgtaaaagatttaagccacggctttggtgaccgtgcgctttttaacaatgtatcgttccgtcttttaaaaggggagcacgtcggcttaatcggagcaaacggcgaaggtaaatcaacgtttatgaatattattaccggaaagcttgagcctgatgagggtaaagttgaatgggcgaaaaacgtgcgcgtcggctacctcgatcagcataccgtgcttgaaaaaggaaaaacgatccgcgacgtgctgaaagatgcgttccattacttatttgcgatggaagaggaaatgaatgagatttacaacaaaatgggcgaagcggaccctgatgagcttgagcagctgcttgaagatgtcggtgtcattcaagacgccctgacaaacaatgacttctacgtgattgacagcaaagttgaagaaatcgcccgcggcctcggcctgcaggatgtcggacttgaccgcgacgtcactgatttaagcggcggacagcggacgaaagtgctgctcgccaaactgcttttagaaaaaccggaaattcttctgttggacgaaccgaccaactaccttgatgagcagcatattgaatggctgaaacgctatttgcaggaatatgaaaatgcgttcatcttaatttctcacgacattccgtttttaaacagcgtgatcaatttgatttatcatgtggaaaatcaggagctgactcgttatgtcggcgactaccatcagtttatggaagtctacgaagtgaaaaagcagcagctcgaagccgcctataaaaaacagcagcaggaagtggctgagctaaaagatttcgtcgcccgcaacaaagcgcgggtcagcacgagaaatatggcgatgtcccgccagaaaaagcttgataagatggatatgatcgaactggcggccgaaaaaccgaagccggaattccatttcaagcctgcgagaacgtcaggcaagctcatttttgaaacgaaggacttagtcatcggctacgatactccgctgtcacgcccgctcaatctcagaatggagcgcggacagaaagtcgccctgtacggcgcaaacggcatcgggaagacgacgctgttaaagagcctgctcggtgaaatccagccgctggaaggcacggtggaacggggcgagcatcaatacacgggctatttcgagcaggaagtgaaagaaaccaataacaatacgtgcatcgaagaagtgtggagcgaatttccttcctttacccagtatgaaatccgcgccgccctcgccaaatgcggcctgacgaccaaacacattgaaagccgcgtctccgttctcagcggaggagaaaaagcgaaggtcagactgtgcaagctgatcaattcagaaacaaacctgctcgtgcttgacgaaccgacaaaccacctggatgtcgatgcgaaagaagagctgaaacgcgcgctgaaagaatacaaaggctccattctgctgatttcccacgaacccgagttctacatggatatcgcgacggaaacatggaattgtgaatcttggacgacgaaagtgctgtaaacacaaaaaggaactcccgcctgtgcggaagttcctttttttcttaatgtccggcttttattccggcgagatgtttgcgtcccatgagaaggacaagcatgccgacaaaaacgacgatcccgcctactgtatatggagtgcttgcggtgaagtgttctgacagcattcccgcaatccacggagcgagcgcaccgccgataaaacggactgagctgtaggctgaagacgcgattgaacgttcaaccggcgcagaacccatcacagcggttgtcatgatcgtattcaccataccgagaacagcaccggcgacaacgatacatgtaatgatcaacgtctgatggtcagtccagatccccatgacgatgagaatgaccgcaaaggcgataaagagaacgacgagcgaacccactgttcccagcgctttgtgcacgagcggcgccgtaaagactgacgtaattgccagcaataacccccagccgaagaagacatatccaaggccgtgttcatctaaatccagcacgaacggagaataagcaagcaaaataaaaaatccaaagttgtataagaatgcagatactgccattgtcaaaaggcctttatatttgagcgccttcatcgcatcaaacacaccgacgcgtttcgccggtttcggcagcttcggcagcatgagtgaaatcgcgcaaagcgctatgaacataaggacagatactccgaagaacggagcgcgccatgagatgctgccaagctctccgccggcaagcggcccgacggaaatccccaagccgagcgcagcctcatacagaataatggctttggcgctgccgccgactgataccccgacaatgacggcaagcgcggttgaaataaagagagcattcccaagcccccagccgccgcgatagccgacaagctgagcgattgaacttgagcttccgccgagggcggcaaacacgatgataaaaataagtccgagaagcagcgtccattttgcgccgatccggcttgaaatcgcgccggagaaaaacatcataaaaccggtaacgagcaaataacttgtaaataacagagatacttcactaggtgaagcatgtaattgtgcggcgatcgccggaagaatcggatcgacaagaccgattcccataaaggaaataacacaggcaaacgcaaccgcccaaacggctttcggctggctgaataagcctgttttctgttgtgatgatgtatccatttgaccagacctcctgtttcatccattaaaagaaacgctatatccatagcgtttacagcaaaatcattcgattgattgaatggcgcggtcagctttttctttcattccgttaaggcgcgttttaaaatgctgaaatgtgctgatcttctcatcaatcatctcaagctggtggttcaaagcgtgctgaatctcttccagcttttctttccgttccttcggatccagtgacaacaagtacccctctttgtttaattccagctgacggctcatctccataaactgctgaagctcctgaagggaaaaaccgagcacttcttttgtgctggtgactttttcgagctcctccatatcatcttcagagtaaagccggacgccgccttctgtccgtttaggagcaggaatcaaaccaatctcctcgtaaaaacgaatggttcgttttgtcaatccgcttcgcttggcaacttgatcaatcttcatccattccaaggtgaatccccctcttgtcgtatctgtttctattatacaccatttgaaccttaacgtaaacgttaactttttatgcctgataaacttggtttggacaaaacgtttgtctttaaagcgccgggagacatctgtgtaagataaaaaaagccggtatgacccgccatctttctcgggggccgtaccggcttttcttaattctcaagttcttcaatcatcagtgacaattcggtccagcgctccatcgccgcttcaagctcttcagccgtttttgcctgttcggccatcagttcttgaatctttccgaaatcacttcccgcttcagcgatttccgcttccagacgctgatgcttttcttcaaggccggcgattttgtcttcgatgccgtcccattcaatctgatccttatatgaaagctttttgcgctttttcttcggctcttcttccgcctttttctcttcggccggctgttttaccgccgtcttcttcgcttttgcgtgttccatgtattcactgtacgaaccttggaaacgggaaatgacgccttgtccttcaaatacgatcaggcggtcaatgacgcggtcaaggaaatagcggtcatgggatacggtgatgacgacgcccgggaactgttcgatataatcttcgagcacgcttaatgtttccgtgtccagatcattggtcggctcatctaaaaacagcacattcggttcctgcatcagtacattcagcaagtacagacggcgcttttccccgcccgacagctttctgatatatgtctgctgcatcggacgagggaacagaaaacgctcaagcatttgttccgcggtgatgacatcgccttccgccgttttgacgatttcagccgtctcttttatatattcaatgactttcatatcaccgttcatttcgctgtggtcctgggtgtagtagccgatccggaccgtctgcccgatggtgatattgccgctgtcaggctgaattctgccggcgaggctgtttaaaagtgtcgttttcccgattccgttcggcccgatgatgccgattcgttcccccgggatgacaagctcattaaactgactgatcagcgcttggccgttataggtaatggcgacgttatcggcttcgatcacctgttttccgagacggtgggagccgatcgcgaaatcgagtgatccggagactgccggccctttttgctctttgagcgcctccgctctgtccactctcgctttttgtttcgtcgagcgcgctttcgcccctcttctgagccacgccaattcgcggcgcaggaggttttgacgttttgtttctttctgctccgccagcgcttcccgttcggcccgtttttccaggaatacttcatagtttcctttatacgtataaaggctgcctctctcaagctcgtaaattctgttcgtcaccctgttcagaaaatatctgtcgtgcgtgacaagcataacggcgcccggatattgcgataagtagccttccagccattcaatcgtttcattgtccaagtggtttgtcggttcatccaaaatgagcaggtcagccggctggatgacgtttttcgcaatcgcgacgcgctttctctggccgccggacagctcgctgacatccttcatcagatcggtgacgccaagtttggttaaaaccgttttggctaacgtattcgcctcccacgcatcattcgcgtccattcgggcctgcgcatcaagcagctgtttctggcgctggtcattttccggttcttcattcagcgcctgaagcgctttttcgtattctctcatcgttctcatgacggctgatccgccggaataaatatgttcaagaacggtttgtccggccggaagatcagggtcctgatgcaaaaactcaatatgcacgtttcctgaggccgtaatctcgccttcctccgttgattcaaggccggcaatggttttcagaagcgtagacttccccgttccgttcgggccgattaaaccgattctttcattctcttcaatatgaaaggagatatggtcgaataatgtcttatctccgtatgttttataaaggttttccgcttttatgatgctcatggtccctatcaatcctcacgtaagttcatgtgttcattttaaatcaggcgctggaataaaactagtaaaaggacagacaaatttcttggaagagatcattttgtccgaagaatgtttccgcctctccttttatacactggaggtgaagaggtgatgacatgatcagcgtcagtttgtgcgttatcgtgaaaaatgaagaggaagtgcttgcgggctgtcttgattccgtcaaagacattgcggatgaaattgtgattgctgatacgggctcgaccgaccggacgaaagaaatcgcggcccgttatacggataagatttatgattttgaatggatcgatcactttgcggccgcccgtaactttgtgttttcgaaagcggaaatggattatattctgtggctggacgccgacgatatattgacggaaaaggaccgtgaaaagctgattgaactgaaggcgtcgctttcaaaagaggtggacgcggtatccatgtattatcacgtcggctttgatgatcggggagaggtcagcttcagataccgccgcaaccgactcgtcaagcgtgaaaaagggttccgctggatcggagccgtgcatgagtatcttgaagtatacggaaacatcatagaaaccgatattgccgtcacacaccggaaatccgagaaaaagcactcgcctccctcagaccgcaacttgaagatttatgagaaaatggcggaaaacagtgaaacgatgacaccgcgcgatttgttttacttcgcgaatgaattaaaggatcacggccagtatcagcgcgccatcacgtattatcaccattttctttccacaaaacagtgctggatcgaagacgagatcagaacgtgccaatatctatccgattgctacagggcggtcggccatgaagaggccgccatgacgtctctcttaaaatcatttctgatcgattgtccgcggccggagttctgctgcaggctcggcgactattttgcggagaaacggcaataccggcagagtgtgttttggtatgagctcgccctatccgccaaaagcagtgatgcaggctttacccagctcgaatattccacctggtatccccatctgcagctctgcgtctgccactggcagctcggcgacagagaaaaagcgaagattcataacgacaaagccgcctcctatcatccgtcacatccgagtgtcctgtataatcaaaacgtgctcggcacataacatcgaaaaaaagagctgccccgtatgaagggcagctccttattgattacgctgtcggaattcctccgcttacactgtaaatttgggatgtcacatagctcgattcttctgaggccaaaaagacataaatccctgctagctccgccggctgtccggcgcggtttaatggaacggcaggtgtttccttgccgaatttcggaatgttttcaccgggctgtcctcccgaaatctgcagaggcgtccagatcggccccggcgctaccgagttgactctgattcctttatttgccagctgttttcctaagccgacggtaaaaccgataatggcatgtttcgtcgcggcataatccaacagcatcgggcttggattatacccttctacggacgttgtcgtgataatagacgcgccttccggcagatacggaagcgcggctttgacgagccaatacagcgagaatacgttgacttcaaatgtttgatagatttgttctgtggcaagatcgctgatatcatccactgcctgctgattgccggcgacaagagcgagcgtgtcaagaccgccaagctcttgatacgctttttccgccaattctccgcaaatcgcttcatcgcttaaatctcccggcagcagaacggcttttcttccctctttttcaattaacgctttcacttcttcggcatccggctgttcctcaggcagatagttaatggccacatccgccccttcccgggcataagcaatcgcggcggcccggccgatacctgaatcgccgccggtgacgagggcttttcttcccttcagcttgccggctcctttatagctcgtttcaccgcagtccggcacaggcttcatctctttttgcaaaccgggcggttcttgatattgttttggaaattcatcatgatcatatttcgtcagcgggttgtgcagatttgcatcagacatacaagactctcctttatcatgggtgatgtattcgtatgtgtacccctttagcatgacggatcaaacgtgtaagtgcagtttccgattgataaaggaaaaacaaaaaaggagcccgtaagctccctttttttatgactctccgagtacgttttcagccattttcgctaaatgctgggcgcttcccgaaatttcctgcatcgtggcagaaatttgttcaaccgccgccgcttggccgtttgtgttctggttgatggattcaatagagtcctccagccctttcagcaggctgtggatttttttcgtaatctggtcaatttggccgacgttgtcttttgaatgagtggcaagcttgcggatctcatccgccaccacggaaaagcccttgccggattctcctgctctcgcggcttcaatggccgcattcaaaccgagcagattgctttgatccgagatgcccttgacagtgacggaaatgtcggcgatttctcccgcgctttcactgacttgtttcgcctgagcggaaattccggtcatctgtgctgagaaaccgctgatggattctgagatatccgcgatggccgaagcggtctgttccacgacggcggacaggctttcagcgacatcatgaagcttggctgatttttcaaggctcgtgccgagaccgacgccgccgatgacttttccgttttcatcgtgaagcggaatcgctctggcgatcagcggaaatccgaacagctctttcggcaccatgcttgtcttcttctgattcatgcggatcgcgtctgtaatgatgtcccctttttgcagcgggtctcccggctttacattaagagaaaacgttttagccggaatattcacgattaatttttctgtatcataaattccgatggtgatgtcatcttggatcaggctgtttaaaaaaggcgcaactttgacaaatgcgtcaagcaggctgtgcgtttgctgctccgtctgtatactcatttctttcactccttcttaatatgggaattgccgtttttcatgctgaaccgaaatccatttcagcgtggtgaattcttcaaggctccattcaccgttcagcctgccgagacctgattgcttctcgccgccgaacgcgacgttcggttcatcattaatggtcgtatcgttgacgtgaatcatgccggtttcgatccgcttagcaaactcaacgccgcgctcaacgtttgccgtatgcacggctccgcttaaaccgaacggtgtcgcgtttgcgatgcttaccgcttcatcctccgtttcaaatggcatgatgcagacggccggtccgaacagctcctccttcgcaatgctcatctcaggtttcacatcttttaaaatgacgggctcagcgaccgttccgctgaatcggccggacagcaccggaaccgctccctcttctatcgctttttcgacagaccgtctcaaaccttccgcctgtctctcattgattaaagggccgataaccgtatcagggtccatcggatcgccgactttcagcgatgacactttcgcttcgtaaagctctgtaaatttgtcatatacagatgtgtgaacgagcacgcggttcgccgacatacagatctggccttgatgcgtaaaccggctgaatacggccgcattgacggcgtattcaagatcagcatcctcaagcacgatcagcgcgctgtttccgccaagctccaacagcggttttttaaagtgtttgaccgcaagctgtccgatatagctgcccactccggttgagcctgtaaatgagattatccgcgggacgggatgctcaacaaagctgtcgccgatctccccgatatccgtcacgataacattcagcagcccgtccggtacgccggccgcttcaaaaattttcgcgataagcgttccgccgcagatcggtgtttcttcatgaggcttcagcacgacgccgttccccgcgccgagtgccggcgcaacagatttcatcgaaaggaaaaacgggaaattaaacgggctgatcacccccacgactccggcgggtattctgtacagcctgttttcttttccgtcaatcgtggacgggagaattttcccttccatccgcaccggaaatgttgcggcttcttttatcatatttttgacaagtccgatttcaaactcagccttcagccgtgttccgccaagctcctccatgattaagtaaataatcgcttcttcgtgctcttcaatgaaagaaacggctttttccaaaatggcccgctttttaaaagggtttactttgtcccattcttgtttcgcaagagccgcggcgcgatatgccgcatccacgtcatcagacgtcgctttttggaatgaggtgatgactttttgagtataaggatttctgttttccaatacgttccggctgctcccatccctccatcggccgccgataaactgcttatttagttcttcatattgaaacatgtaaaacatctccctttcaccgaaacttgaaattagttgatgagtcatcttttgtatcggtcttaaggtgagaaaattgaactatttcacaataaaattcccgttccttccgtgcatcgacgctttttagctttgtccttttaaagtggaaaattctttaattgactgcgagaaatttcgacaatataatacaaacgtcagtgtatataatgataagaatattatgaattttcaggaggacccatatgtctttactatttcggaaaaagccgctggccgacttaaaggcccagagcaaacagaccagcctgtcccgctcgttaagcgcttttgacttggttttgctcggaatcggctgtgttgtcggcacggggatttttgtgattaccgggactgtggccgcgacaggcgcaggaccggctttgattctgtcgtttgtgctcgcgggccttgcctgcgcgctcgccgcgttttgttatgcggaattttcttcatccattccgatttcaggcagcgtatatacgtattcatatgtcactctcggggagtgtctcgcgtttttaatcggatgggacttaatgcttgaatatgtcatcgcgctcgccgccgtcgcaaccggctggtcatcctatttccagtcgcttcttgcgggcttcgggctgcatcttccggaggcgctgaccgccgcacccggcagcaaaacgggtgccgtgttcaacctgccggccgttatcattattttggtcattaccgcgattgtttcaagaggcgtgaaagaaagcacccgctttaacaatgtcattgtattgatgaaaattgcgatcattctgctgtttatcatcgtcggtttcggctacgtgaaaccggaaaactggtcgccgtttatgccgttcggaatgaaaggcgtcatcacgagcgccgcgaccgttttcttcgcgtatctcggatttgatgccgtgtcaaacgcgtcggaagaagtgaaaaacccgcagaaatcaatgccgttcggaatcatcggcgcgcttgccatctgcaccgtcctttacattacggtatcgctcgtcctgacgggaatgctttcgtacaccaagctgaatgtcggggatccggtatctttcgcgctccaatttgtcggccagaacaagatagcaggcattatttccgtcggcgcgattatcgggattacaacggtcatgctcgctctgctttacgctcaggtgcgcctgacatttgcgatgagcagagacggccttttgccccgcatgttttccaaggttcacccgcgttttaaaacaccgtttcaaaacacatgggtgacggggatcgttgccgccgggatcgcgggttttattgatctgggaaccctggctcatctcgtcaacatgggaaccttggcggcctttacggtcattgcgatcgccgtcatcgttttaagaaagaaacatccggagatcaaatcttccttccgtgttcctttcgtgccttttgtgccgatcatcagcgcatgcttatgcctgtatctcgcaagcagcctgccgggcgtgacatggctcgcctttgtcatctggatcgccgccgggatcgtcgtttatatgatgtattcgagaaaacacagtttgttaaataaataaaaagggaggctcttttttctgtttgagaaagaagagccttttttgcacttgataattcattcaccttatgaataatatggtgtatgcttcgtttacataaaaaggaggagaatcactttggcaattgccgccccgcttaaagaaaaacctgtccatcgtcccgaaacaaccatgtattctattttgttcattatcgggatctgtcatctgctgaacgattcactgcaagcggtgattccggcgatgtttccgatattggaacgttccatgaatcttacatttacgcagctcggaattatcgcctttacgctgaatatggtgtcttccgtgatgcagcccgtcatcggctggtatacggataaacgcccgatgccgtatgccttgccgctcggactcaccgcaagcatgctcggcattttaggtctcgcgttcgccccgtcttttctgacgattttatgctgtgtcttttttatcggccttggctccgccgtctttcatcctgaaggatcgcgtgtcgcctacatggccgccggcgaaaagcgcggcttggcgcaatcgatttaccaagtcggagggaataccggccaggcgatggcgcccttgattaccgcgctgattctcgttccgctcggtcaattcggctctgtctggtttacacttgtcgccgcaatcgctgtgctgtttctcatctatatcgccaaatggtataaaggccgccttattcatttgcgcgccgtaagtaaaaaatcaccggcctccgctgtgcagaccgtgattacaaaaccgattattctcgcccttatcatgattatcttcttaattttcgcgcgctcctggtatgtgagcgcgatcggcaacttttatacgttctatgcgatgaatgcctatcatgtcagcattcagcaggcacagagctacatcttcgtctttttatttttcggagctgtcggaacgtttctcggcgggccgcttgcagaccgtttcggaaagcggaacgtcatcttcgtttcgatgatagcatcggctcccttgacgattttccttccgtttgcggggcctgtcatcgcctatggcgtactggcgctgatcggtgttgttctgatgtccagcttctccgtgactgttgtctacgcgcaggagcttgttccaggcaaaatcggaacgatgtcagggcttacggtcgggctcgccttcggaatgggcgcgatcggagccgttgcgctcggagctcttattgattcagcgggattgacgccgaccatgacagccgtcgcctttctgcccgttttaggtctgctcgcctttgtcctgccgagcgacaaaacattaaaagaatggcattcataaaaacaatccctgccgaaaaggcagggattttatgtttcaaccgtataaaaatgagtgtcaggaaccgcatacttcggaataaacccgtctctgaaatcaggaaacgctttttgaatttcatcaatccatttttttacgtttttgatgtacggcacgtaaatcatattgactgtcgcctcgtcatcaatgtgatagtaccagcacagattgaattcgttctccgtgacgagcgtaaagcctgaaaaatgataaaaaatcagcggggtgtcattgacatatacagccccgccgcgcaggctgacgtcatattgctcaatattccacagcgccgcattcgcgccgatcgactccgtgacatgaacgtcttcaaactgcgcgggccacttttcaacatacctttggtcaccgtatgtctttttttcttcattcatctccaccgtacaataggagatgcaatcctgtctccactgccagaccgcccgatacgcttccccggtattccgcgcgccgacaaacccggtgttgtactgccccgtcagcttgtaataagacgcaaaccgttctgaattgcggtgatccgtcagaaaaagggaagcatccggcttttccgcaaacaactcgcccgcatctgagaagaaaaagagatcggtgtccaagtgggcaaaatattcggctccatcatactccgtcatcacatggaacagaaatgccggtttcagcgtccagcaatattcatgaaacgtccgtccgccctttgcttcaagcagctccgggtcctccatttcatggagctgaaccgccgtgacatgttcccacggcacctgctgaagcagttcgtacgctttctggtcgacacacagcacatacagatgaaaatcccggcaatgctcatggagagaatgaatcatcggcatcagtttaaagatatgcgttctggaaacaatggttgaaaaatgatatttactcaccatatcacatccaatttatttaagatccacatgcagtaaatcagcagccagcgctttgaacgcccttgcaaagtgcgtgacgcccagctttttttccgcttttgccaaaagctttccgacctccggcagattgaagctgttcgccgtgatccgcgggcttttcgtcttccagtccgggtcgaggttgcggtctttaaccgcgtgcagcagctcgagaaaaatgtgcagcaggctttcatatttctcataatcaagcagcacttcgatgtctgccatcatgctgttggttaactccgcgtcaaacgggccgttaaacgcgaggtgcacgtcaagcgaacgaatgtcattgtacttgtcgcacatgtacgcgatattcgccctgatatcatcaacggaagcgcagttgctcggatgctcctgatggacgctcatgatatcgcgccgcagctgaaatctcattcccgactgatgaagcctgatgccgagatcataatcttcaaagccgtatctgacaatgccttcatcaaacagcccgagatctgccacgtgctgtctcttgactgacgaattgttcgtaatgaaaaaacgccacggcagacggtagcctttcaaatcatctccgtatttttccaaaatgcttttcagcacacggataaagtcggtatctaaatcaaagcattggtcaagaaaacttccgtctctgatgtcactttcatcaaggagcggctctttatcgcccggcagctcttcatacagttcggcgagtttctctttatgctctttttcaaaacggtcataataaaagctgtaaatccgcttccagaacataccgcatacgactaaatcgtcccggttctcatgagccttgatatgcttcgccaccaaatccttttcggcaagcatgtcgctgtcatggaagatcaaaatatcgcctctggcattgcggaccgcctgattccgtccgtaagcgatccctctgttttctttaattctcacaaaaatcagcggaaaattcgcgctgaatgattcaagcatggataaggttccgtcttccgaaccgttgtcagccacaatcacttcgaacggctctgtgcattcctgttcattcagggacagcaggctgttataaagccgctccttggaattatatgcgggaacaatgacgcttgccttcacttttcgttcacttcctgtatatgatcatttatttgttatcatcctcagatgcaaagccgctgaactccgggcagacggcgctgaccgtcccgatcacccgcttcagaatgtcctgataaagctgatggacaaacggcaggtcggtccggtccgtctcatgaatctgccgaatgtcgccggctgtaacgatccggtatccgctgaaatgatagaaaatcagaggacttccgtcttcgagcacaagacgcccgtccttccatgaaaacgtgtggcggccgtaattccaatggccgatattcacgccgggcgtggtgatgtcacacacattcgggaacaggccggacatgtaatccaagtagccttgatctccgaattttccttcgcccggcgcatttttgcattcttccaggcagcgttctttccaccatctgagacaatctgtgccggcactgtcggttttgaagctgagaaaaccggaattataccggcctaaaagacgctgcagcatgtcgatttcctgttttccaaatgagggaatgacgatatcgccccgtgacagaagcaccgaacaatccggctgattgtcaaaaatcgcgcgcggatcagcgaagaaaaacaaatcggcatcaatgtacgtgacacgctctaattccggatgtccgtccagcacgaattcgagaaataccggcttcaccgtccagcagtattcgctctgatccctcgtccgcttcagttcaaggagctcctcattttccagtgcggacacctgaatcaaggtgacattatcctgccgcattgcctgaagcacgtcataggtgtcttggtccatacacaaagtaaaaatgggggcgtccgcctgaaccgctttcaatgagccgaacaaagcgatagcctgatacagccttccttttgataaaactgtgcaatatgcgcttgtcacgtctttctctcacctctgtttctgttacttttgaaaaaaggctttataccatttgatcgttttttccaatccttcatcaatggtatgtgcgggtgtccaattcagaagcttcctcgccttttccgccgataaatattggtgcttgatttcatggcttccctggttgagcactttcggcttgaggtcactgtccatggccttaagaattttttctacaagctccagcaccgtcagctgaatctcattgctgaagttgaacgcttctcccgcaagattgagctcctccatcttttccgccagcaaaaggtatgcctcgaccgcatcctcgatgtaaaaataatcacggataaatgtgccgtcgctgcggatttccggcgcttcaccgttcagcacgagctgaatcgtctgcggaataatccggttgaagttcaaatctccgccgccgtacaagttgccgcagcgcgtaatacagaccggaagtccgtacgtattaaaatatgtgtggcttaacaaatcggcacagctttttgatacgtcatacggatgtttgccttgaagaggcatgttttcatcgtacggcagtgtcggctggtcgccgtacgctttatcactggacgcgacgatcacccgcttgatgagcggatgcctgcggcacgcttcaaggatgttccatgtgccaagaatattggcttcaaatgtggaaatcggattgcggtttgcgacgccgacgatcgcctgagcggctaaatgaaagaccgtgtcaatttcatattcgcccagcgcccgctcaatcacatccagatcttcaagcgcgccctgcacgatattcatttgcttcacttgttctccctgatacaggttcgacttgggtacagtgtcacggacaagtcccgtcacattggccccctgatcgatcagttccttcaccaagcagcttcctaaaagacctgtacatcccgtcacaaacacatttttatttttccagaaactcaaacttgatcaccataccttccatacatgttgtccccggtcccacatcttgttgatttccagcaggtttttatacgtatcgatcgccgtccagaaaccgtaatgccggtataccgccaattcgccgtctttcgccagctctttcagcggttcttcttcaaacatgacatccctgtctttcggcagatactcaaataccttcgggctgagtacgaaaaatccgccgttgatgatgccgtcactcgaggttttttcagaaaagcttttcgccatgccgtcttcaaccgtcaacgttccgaattgcgaggacttttctataccggtgacggtcaccgctgccccttttgattgatgatagctgatcagatgaaacaggttgatgttggccagtccgtccccgtacgtcataagaaaggtttcatcaccgatgatgtcctttgcctgtaaaagccgccccgctgtctgcgtgtgttcccccgtgtctaaaaaagtgattttccacggctcggattttcccaatatccgtacttctccggtagagctgtccagcgtcatgctgtgattcttccagtcataatctaagaaatattccttaatcatctctcctttgaaaccaagaagcaggataaattcgttcacgccatagtattgatagagtttcataatatgccatagaatcggtttgccgcctatcatggcgagcggtttgggacgttcattggtgatttcgctcattctcgttccttttccgccgcagagaatgactgctttcatctctacccctcttctctgtgaatattggattcgaaaccgcccgtataagagaaacaacccgataatttgtccgattctctatcaccggtttcaaaatctactgtaagatatgagagattggcgccctttgtgaccaaaagctctctcttttttcagattggtgaagatacacacaaaaaaagagcctcacggaaattccgtaaggctctttctattatttattatcctgattcagcttttctttgccgtaatgatatttagacggatcaaccggcgtaaagtcgctcaatttgtggaatctgagcaagtctttgtacatcacgctgtcagacagcttcagctgctctgtgactctggctttcaggtttttcgtttcctgattgcctttcagttcttttcctgtcttcgtatcgtatacgacattggagatggaagtatatttcggcgtgacgtaatctccgttacggaacgtcaccgtatcatcatggtctttcgagaagagatcggtgccgaaattaatatatttcttagaatcgatgccttccaagtgaaggatcgtcggcacaacgtccatttcaccgccgtacgtatggttcaccccgccttttttgccggggatgcgaagcataagcggcacacgctgattctgcgcgttttgataaggcgtaatttctttgccgagaatttctttcatcgcgcggttatggttttcagagattccgtagtggtctccgtaaagcataatcaccgagttgtcatataaaccggatgacttcagatctttaaagaactgttcaagcgcctcgtcgagataacgcgccgtctggaaatagtcatccacagtcgcgtcgcccgttttcgctttttcgatcgttgcgtctttttcatcaagcgtaaacggataatggttcgtcagcgtcagcaaatgcgcgtagaacggctgtttcagcgattgaagcttcggaatggattctttgaagaatggtttatccttcagtcccatattgacaaggttgtcatcagacatatcgtatgtgctggcgtcaaagaatttatcgtagccgatatgtttgtaaatctggtcacggttccagaatgatttgtagtcaccgtgtaaaacggcgcttgtatagccctcactttggtcaaggatggcaggaagcgattgatacgtgttttccccttttgtcacgaaggctgacccttcaggcagtccgaacagactgttatccatcatcagctcggcgtcagatgttttaccttggcccgtttggtggaaaaagttatcaaagtacgtcatgtcctctccgccgcgggcgagtttattcaggaacggcgtgacttcttttccgtcaagtttgtagttgatcaaaaacgattggaaactttccaagtgaatcttaataatgtttttgcctttggccttgccgaaatactcggcgttcggcttcgcataatgcgacgatgtgtagttttcaacgctcgtcaggtcatcgctgctggcatatgcccgctgggattccgtctgcgccgtctgtacgccgtcataaatcgtgtaattataaaggcctaagtattttacaatgtaattgcggtcaaacgttcttgtcagcagctccgggcggtcctcttcggcaatcgccaggttcacgaagaacaaaacaatacccgtcacgataattaatgacgtataccgttttttcagcttgaattccttcagctcacgtctccacaccagaagtgcgattaaaataataatatcaacaaagtataaaatatcatggccggacataatgctgaagatgccgtctcccatatttcccacattaccggattgctttaagttcgggaatgtcaagaaatcatcgaagaatcgatagaataggatatttgcatacaaaataaacgtcatgatgaaatcaataatcaccatgataatcgctgatttgcggcctttcgcaaacaatgccagtcctaaaaagaaaatggcgcttgagaacggattgatcacaagcagaaactgctgcgtcggacccttcaccccaaggttgaattcagcatgataggctaaatacgttttggcccaaaacaaaataatagccagtacaaaaaaactaagtctgtaagaaaataatttcttcatggcaacctctactttcctaaacactttaaatctgtattcttactttttgcttcaattcctgctttccgagcaaaacgaaagcatcacacagccccataaacacaccatttaaaaaaacgatatatttatcattcgtgtcatgcccattgaacatcttatcccgccagccattagacgcaggatatccgttcttcgtttcacatttttttctggcattaaaaggtaccgtatcagacccggtctgaaaataggagataccaaatataagaataacacaaacttctaaaaacgaaaaatgaatatcaaagacagccgcccaacaggcgggctgaagttattgtatgcaaaggggctgaaaaacttgaaggttttttttgctgatgtaaaaaaaggactggagtcatccagtcctttacctgtcaaattatcgcttagaccctaaagatatacaaaaatgctttcttcacgtttaccttttgttttttataatccaaccatgcagcagagctggcatttgtgactgcttaaactgttctccaacactggtccttaacgcgtcttgcaaatttctgtttctcattagcgaaaaaaattgtgaactggtttcatcaaacccgccaataaaggaattacccacctgaaatgacaccccatgttgttctttggtcacaacatgcagcagctgtttaaattcttccagtgttaaagaagcacggtattgatcttttaaataggcttcttcctcacgagattgcgctgtgttaaggccctctcccaaactgttcctgtccaagtctacaatatagatacatgattgatctgataatagatggatgagtgtatttacaatagcaataggattcttaaagagtccaaaacatagatgtatgaatataatgtcttgcttcttagacacatattgcataatattttctgcatttgaacatataaaagatgcattaataccgagtttttttgctgaagaaattgcttgggcagaggaatcaatacctgtcagttcgatcttttgaaaccgactgttcaaatattgaattacttgcccctgtccgcaaccaatatctaatacagaatacggctctctattaaatttactggagtaaaacgacagaaatgtttcaattgaaatacttctaatggatgaggtttccctctcatcataccgaaagctcactttacttttctcaggatgagaaaaccatgtttgtgcttgaattctgttggcttctgactctctgacaattgtttcaatttccatataactgtgacacctccaaagagtttaccactctgcttgagacattgtcggcgaagatgtatttattttccttttgctgacaggacgaaaatactggatagttaaattatgcacaatatggaatgcagctactgataaaaaatcaaattgtgcagctattacagctattacagtaaatacagtcatatagggggctgactttacaccaccaaggggaatatggagcagtaagaatcctatcgagctaatacacgtacacaataagacagaatcaaagaagtatagtttaaatagaaaaggaatacaaattctccatattaattcctctgaaactgcgcataaaggcaggaaaatcaatgtatcaagtttatttacttttcttttaacaaatacaacagatttgtttttacgcttccagataacataaggaaaaaagaaacctagggcactaaataataaaacaccgtacgcattattgctatgtattaaaaaaaagttatcatctaataagaagatgctgcaacacataattccaccaaaaacggtgataatatcataactgcgctgcggtgttatatgacgagtcagtttatattccttagttctatgcttgatttgatacataactgttagctttgaaacatagggacccatcaaatgaatcaggatccctataaagatgcatacccttaactccatcatgttcctgcaactaaagtatatataggtgcatcgtctactccattatggccaccaataagatccatgagctcatcatctataaaccctccgtatggacggctctggatacattgggctgtggccaataaaatcatattctgcatcagatgacccgcttcaataaatataaatcgatatgaacgatggccatatttaaaccttgacctccaaaagctagccgatatgattacagcgaaagaaaagtcctttacagcttcttcttgtaacattattcttccgaaatcctcttcagagtactcacctagatgaactaggccctttcgataaggatcaaagtgatatagacctttttccaaagaatccaccttgttgctaacaacgtacagatccaacggataaagagctccgccagaaggaatagggcgtctaggaccttcagggcgctctattaatccataactaccctgcagaatggtagaaagctgtgataatgttgtactaccaccgttaaactgttcgatacttctcctatttcgaataacttcatctaatgatacacttgtcctcaatggggaaggtaatgtaatcaatggcaagtcatcaaatcgtttacctgcatgagtagcgatcttctgtaatgttgcagatctcattaggcctgctactcctggcgcgtcccacgccatagagcttcgataaactttcgaagcctcaaaccagttctcagaaggatcatcaaatcttagtttttcattgccatagactacatcaaccaaattagtggcatgcctttcaatctctttcatttcgttaacccctttcaccttagtatttatgggaatggatgaggtactggattaagtgtttcgattgtaaacggctctggtactaaccctaaatcgtaagaatgtcgtaatatacgttctccacccaacattcttcccctgtaaaggacatctataggtttaaaccctggaatgatggactttactacataagctccggcatcttttatatcaggacttgttaaatcaaatgtagccactttgaaacctttttcatataggtgatcatttagactattccaaagtacatcaggagaactatcatcgaatgacttaaattggttaacatcaactaaagtgctgttacttgtaaggaaatcagcttccttgacgatatcggttcctgcgtaaagcttgatatggtcctcaaaactattgatatccctattaaaatccgcattcactaatgcgttacctaaacgttgttccgtcttgacccaagttcttgtatacatcccttcaattgctgccttttcacaagccctttctattgaataggaggaggcggctccaattgcaaaaggggctaaattcgtatgaggatttctgacaactgctagcacagaaggaatacctgaaaatacagtcatatcaactaagtgcagccgcaatgatgttggtttaatatatctttcataaaagcgttttaatctcggagaagaattcacatcaatctggggcaagctcagcttgttataccaggtaagcataaaagcatcccgttcaatcgtttcaaataaacctgaaattgctgcttctacaaaggtaattccgcaagcaagaccgttacttgtagcatgacctatattagtgtccccaggccattccgtatgattggcgatatggattagttgccctggggtccatacctcctcatttgttttcgcatatgtcccttttctccaccacagcttagtattttcatcccaaacttcatgaggaaatataggatctttgaattgagttggagcgtacaattcccaatctttatatccaatgaaacgcttattctccttctctaattccttttgtgatccaaaacatacaacatcggaatcaaatggaagataagctgcactatatctttccaccgtttccccaatagcagctagtcttgccgcagccgcattatccgatccgcctccattataagaattagaggggactccgaataaaattttactgtctgtcccatgagcaccgtacgagtgtccccaaacgtcatctacatcgcgtaatttccgatactctcttctcactatacctacatatggatcagcaagactatcaaggactttccatgaatcttctaatgtcgtccatttactcaccataattatttgggcacctcgccgtgataccatacttgaggaaatcctgtgtcagcggcaggagaacacttttggcatctcggtactctatatacacgatgattatcaaccgaaactcccctgtcatccaaattgacagttataaaaccacctggaacggcgcttggtgcatagtctcttagtgtaatccactctgtgacaagattattcgctattcctgcctgtaccaaatgaactggctgattatataccggttgtttcgcagcgttgactggcttgaccttcatcaattctgaacgaaatacctcatctgaaaagtttgctgatttacgtaagttataacaatggagacatgcagacttgtgcgggatgaaaaatggaccaacccaagctgtctgaccatcgtatggaataacacacaaccaagggacatgatcttctaatgattgatcatttacttgttctaacagcgggtccaaatgtgaagctgctacagcaatacgtatcgaaggcttcccattatccggtttttctttccaatctatgtttaatcctgtttcctgcaagctattagtaagggttattgctaggttattttccccatgtgctacaacttccactatgcttgtctttaatctatgtaagatctggttgactttcacttgcccccctgccctctcatatgccaaaaaagcagtcatgtcaaaattagaagtagattgtatacacaatccgttcgtcaccaggaaatcgaagacgtttcttaactgttctttctctaagttgaacctttggtgcagttcttcaattgagactccattctcacatacaagatattctgaaattgcctcaaagaattcaacgattccttctccatcaacttttgtaatggattgtgctttaaagcttaacaggcttccttccaattctcccaaagtaatatgaggagataatttgaaccttacaaccgtttgaatagattgagtttgttgagacatctgtattcctccttaattaatttgtttattttcaaataattgagctgcatttggcggatgcccaattatctgttccagaatattagtagttggttctaatcggtcatcggaagacagtatctgatattctaccaaccattctattagatccagtggcatgttattttgcatcagcatcctaatcgcttcctctttatttttacattgtaaatctatctgcatctccaaatcttgttcaaatatatctttaagtctttccatactaataacttccgctccggttaggtcaaaggctttccctgcgcgaacatttacatctttttttgagattaagcatgcagatgcaacatcttgagtggaaatccaatttacgcctaccggagaaaaagcagtgagcagtattcctgtggctgctgcccatcctctgtacaactcgattccgatatccaaaggggatgttctgtataaaatactttttttatatttttgtagtaactctgtttccacgtaacccaattcatcattcaaattatatctccggtttgaaagtatgattgtttctgcatccaagtcaaaagagttgatgaaagaatcactttcgtactttattgatccgcctaaatctacaatctgcaatggataatcatggagctcagccgccttatcctccaatatttgtttcaggggttccctaactcccatgtagtgaattttcacgtccaatacctcctaatcaataatctcactcgatcaatctcatgatttgtcatcagaaagataagcaaaaagttaatataaccaattaatacttaatatggaaattataaatttgataatcaccgtaaataaatgtcttaacaaaagatggttgaaccataacagttaggacagtgcagcagcaaatagaaaacagcatacaagattaagttagttaggatcagaagttaaatacctttcttaaaagtaaacaaaggatggtgtcttgagaaaaacaaataagttaataacgtattacttcctcctactttagcctggttcatctctctgcgacaaaataatacagggagttacgaatacacaaatatcattaaatcagttattgattttgtaatactatctgaagaagcttcgaagaatgctgaggtaatacaaagaagagtaaatctttcgtaggtgacaccagaatcattacaataccaatggggtacaagaaacccttagtaaatttaagctttattctaagcagtcgggcagtcatcccttttgtccaacagacaaagctcaagcttccttgaagtttgacatttcctgttaagaatccacccaaagccccgatcagcctatgcgattcgcctgaattggcttagctttaacttcaaacaacgtttcctttttcctaacaagttgggttattccgcttaaaaaatagtatttattcccataaccctattaaaacacatactttccctctgatcaaatataaaattcagaattattaatttcatttttaactaaatttagagtgattcagcttcttaaaccaaattgctcattataaatccattatctatatcacaaaaaattacatatttgggttgacaatattgtccatataaatcacaatatggtacatatcggtaaattctttgtcgataaattttatggaggaggtaacaattatgactcaaattaaagtgccaactgctcttattgcaagtgtacacggagaaggtcaacatttattcgagccaatggctgcacgctgtacctgtaccacaatcatctctagttcatctacgttttaacctctaagacaaatagaccaataagatgattcttattggtctatgcttctttatattaaatttaaattaattctactgaatgtaatgaagtcccctcttcttgcagtatacggtatgttgttttatccattttgcctcctgtaattttaacgtttgcaatatcacaagattcaaaccgaatattaattagattgcagttcgtaaaggatactttctttagatagcagttcttgaagaacgtatgcaggatggaggtatctgtaaaattgacttttggcaggtgacaaccgatataaagcatatactcaagtttacatgtgtcataatttgactggctgagatcactttttttaaatgtcgattctatgatggcggagtctttacatgagaaattcttgaagtagcagtttttgaagacagagtgttcgacatcgatattctgaagagttgcacttttaaagtcactgagatagtactcggcatttaccggctcaaaatcctccgttttttgcaaattcttatttataaacgtcttttttttgagttttaatacattggatttatctatattcaggtcactggtatcgaccgccaagcttttggattctatttcgcgtataagcaacttctcaatatccagctttgtcataccctctgcttccaagctaatacttctatcatgaagcttagttaaaagctccgttttttttctgctcagtaacgaatttctttcgtactttttaaatagaccctcgacatacagttttagtttttcacttatcatttcccgctctccttttagtcccagctgcgttttaatgacccattcttcagcggtctagtttcttgccattttaatgtaatgccggtatccaattagagaaactataaatcccagtattgtatagctcagtacaacaagggttacccatattagactttctcctcccgatatcgtcgagaccgattgaattaacccttgatgcgcccagtactgcggaaagagcattccaatagtttgaagatagcttggtaattgatcataaggggtccataaaccgcatacaacagcggtacctaatgcaatcacatttgtcatgaccaaaccggtattttcagtctttgcaaagactgaaatggcaactccccaggatgtaactagtaaagatatcaacacaacaacccacatatacgccggaaaattattaatttcaatatcatacagaaatattcccagaacggacaggagaagaatttgcataaaagttatgactaaaaaagggatactttttcctaagaagaagttataaggctttaaaggggtacttgccagtcttgatacaattcctttttcccgatcctttacaaaacttataacgatggagataataatgaatgtagaaaagaatacgctcataccggttacagattgtgaagctactaaagttttgtttgtactgtctgtcgtaaatagctcaatcagcaatatgatggacacaataggtaatataatcgtccaaaaaaacagagacttatcctttaactgttttagcgtttcaatttgagcgagcggtaacatgataaattccccctttattcttcatcacgcaaatcagtgccggtaagtttaaagaatacatcttctaattttggcttatataaaaacaactgatgaggcacaatattgttttccttactgacgctaattaagcgctccatggtttctaaaggttttttggtttttattatcagccctgaattaacgactgaaaactcaaaaccatggctctttattaattcatgagacaatgaggagttaaacataatagatgattcttcatgtcgtttaagcagttcatttatttctccttcatcgataatctgccctctgtcgataaaagctacatagtcacaaagagtttcaatctcttccatgtaatggctcacataaataatggttttaccggcttttttgagtcgatttacgatgttaaaaatgtagcggcgtgattgcggatccacgcctaccgtcggctcatctagaataattaagtctggatcgtgcattagtgcacacccgatatttaaacggcgcttcattcctccggaaaagttctccacaacgtcgtttgccctttctgacaacccgatatcttctaacagtttttttgttgtttgctttagttttaagccattcagtccatgcacctttccaaaaaattccatgttggtctttgcggttaatttttcttcaaggctgatatcctgtggaacataacccagtctgccatttttattgccgacaaattcaatcttaccgtcatattcccggatgatgcgcgagatgatcttaattaaggtagatttaccggatccgttcggtccaacaagtccataacagactcctttcggaattgttaaagccacattgtccaaagccagagtcgtgccatagcgcttacttatatgttcaacttgcagcatttacaccattcccccactgttatttattttaaatatggattcaattgtattaatgtactccttgtaggctgctttcccttctttcgtaatctgaacaatagtcttcggctttttggatacgaacttcttggttagttctatataagctgcatcttctaactttttcagatgcgaacctaaattcccatctgtgatgtctaatgactttttcaggaaagtaaaatcacattgatcataagtcatcagtaaactcataattcccaaccgtactttggcatgtattaaatcattgatattgttaacattactcatttccttgcccttttcttttcaaaatcattcctgtaagtaataggctgcctccgccaataaatgcaaaaacaatattcattgcctcaggaaataaacagaatgtaagcataccgagtatgctcagccaaaatcccataataaaaatctcttttgttaacacgatgcctaagaatatgtacataatagacaccattaacacaatcaaaaacgatagaaattctcctgttcgcggcaataatcccattaaaatcaggaaaacaaaaatgcataccattaatatgaatccaatccatgcatattttaattgattctttaagaaagtgggcatgggatcaaattgtttctgcttaagatatgtcttcaaagtcagtatccaccctaatactgccagtattaaccagacacaagcaaggactacagaaggtaccttacataaagaaacggagtacgcaataatccatatacagccccaaataatgaaatatggactggtttgccttgagtactcagtcttgtagttcgtcaagaccttgatatgagataagttttcagctatctctgattctcgaaaattctgatttgacataagacaggctcctctttttacaaagtactttgtgaaacagagtatattctaattccatatatttgtaaagaggttttatccaaaataggcgcaactatttagtcttggaaacagcagatgggactcttggcgctgatatccttccaccactgtgagacatccttatcttgttataatatctcacaacaaagccttcagattgctgacaaaccgaatgtatatcgattggaaagcaattcattttcttgaaggaaaaaggactggagtcatccagtccttttcatcaaatcggtcaaatccccgcccaaacatcttttgcgtaaatgccttttgtctggaggtccaaaagccattcttgcgcttgccgttcgtctgtttcgtggaccgactgatacgctttttgcagcgttgcctctacatcgggcgccattttgctgccgtcgccgcatacgtagaggtgccctccccggccgaggatggaaattaaagcgccggcgtctttcgccattaagtgctgcacatacgttttcggtacgccttctttgcgggagaaagccgtatgaagcgtcacgattccgtctttttcataagcttcaagctcgtcacggtaaataaaatcatgatcgtttctgcatccgaaatacagatgagcctcccccagctcttttccttctttttttaacgccgcgcgggcttgcagaaatccgcggaacggggcgactcctgtgccgggaccgaccataataatcggtttttccggatcttccggcagccggaatcgtgtttccggagtgcggacaaacatcacgataccatcctcagggccgcggtccgctaaataattcgaagcgactccgcgatactcacccaaaccgctccgggcggggccgcgaacgacgccgacggtaattgaagcctgcccgggatgtttccggggcgaacttgaaatcgaataataccgcggcttcagcggacgcaaaagctccagaaatcgctcaaacggaagttcacacgcttcatatttttcaaggagatcgagcatcgagacgcgcgatgttaagatttgctcctgatagacgccctcctcaagaaaatcttccaattcccgtttgtgcggcgggcagaccgtataagcagccatttcccggatttgagcccttgatgccgcttcctgcaattcgacacagctgctcagaagatcatgcagcctgaccggccgatcgagcgggagatgaaccgcgctctgtccgctggccgtcagcagcacttgatcattcccgttcagattgaaccggcggagaacacggctgacctgctctttgctgtttaccggcagcacgccgagatgatccccttcattataggcagcctctttcggcagagtgatttcgatatgccttgtgctccggccgctttccggcgcctgaagttccctgttttccgcaacggatgcgtaaaccgcttcatacgtctgtgccaaaggagacccgccaagcccgctgacaaattgaaggcccagcgcacttcgctctttttcggcattttcattcagcttgagaccgaatgccttcatggcgtccgtccacatgctttttttccattcatcaagctttccttcaaaatcgccgctgacgtccccctcgcctcgagaggaaaagcgttccgcccctttttcggcaagcttctcatcaataagcctcggtacagcctgatatgtcgccgcccagttatgatcaccgcagccgaagacggcataccggacgccttccagctccccgggtttgacttcttcaagccattgaacgaattgtcccgcgttgctcggaggctttccgttataagaggacgtaatgatcaagagagctccttctttcggcagttttccgatccggtcatttaaaggcgccgtttcagtccggacgccgtgcatcccggcagtatcggcaagctcccgcgccacgccttctgcggttcccgtatctgatccgtacagaatcagaagcggtcggttatcaagcccgataatggatgcgccttttgtttcccgtttttctttttcgacgtcttccgacgctttttcagccgccgggagagcagccgcaacggcttctttgtttctcggccgcacccggatatgaaagtcgccgggcttgatcgtcagtgtctgtttaatatcgagctcataatcggtgtgatcgataaaggtaaaatgctgcagaatcatccccagaacaagagttgcttcatgcagggcgaactgcataccgatacacgccctctgaccgtttccgaacggcttatacgcatggtgaggcacttgatcaggatgttcaaaccgctccggataaaattcctccgcattgtctccccacgcgtctttatcacggtgaagctggggaattaagacggaaattctgtctttcggcgtgatcggatatttcccgccgatcaccgtatcctctttcgcataaaggctgaacgcaggcgcggtcggccataaacgcaatgactcctgcaaaatcattcggatataagtaagatccagcacttgtttatatgaaggaacgggatcggtcaatacccgatcagcttcctcataggctttttccaaaacacggggatgtttcagcagaaagtagatggcaaaggaaagcaggccgctggtcgtttcgtggccggcaattaaaaacgtgatgatttgaaaccggatattttcatcatcaagtttttcgcccgtttccgggtcttccacattcagcattctggccagcagatccttttcatcccggccgcctgaccggcgctctgcaataatactgtctactaacgaaaacatcgcctgaatgtcatgatgaaattggcgcttcgtcctgatcataagcttatcctgaacatcaaggcgctgcatttggtgcatcgcttcatcaagggcgcgcaccatgctgttgataaacggatgaggcgtttccctgtaatagctgttaaaccgatagttaaagccgcaaagcccgatcgtatcgagcgtcaggcgggtcatatcagcaggcacatcaacggcctcatccgggttcagcctagcccatttttgaatcagctgcaccgcgatatcagtcatcatcgaatgataatctttcatcgcgcgctggctgaaggtcggcatcagaatattatgcgcctttcgccagttaggctcatgcgtccagcttgtaaacagcccgtcaccggaaaacgcccggactttctccaaagccccttcaatgcttttatcgaaccgctcttcatcacaaacctctttcaccagttcatggccggacacgacgataatggcgcccgccggcgtatgcagctgaaaaataggcccctgctcgtttgccagtttgataagcgacattgtaggcttgtctttatcaagcaaaggaagattgccgagcgggccgaatgtcttcggctgcggaatcggacctgtttccttcatgaataacaccctttctaacacattgatgcgttccttccaactacattgcccttttcaccggccgattatccgccgtcacggatcaatcatcggattgacgatcgataacggttttttctatactggagaggcttgtcaaatacagaaataaggtgagttcacatatggattttgaaatcaagtttttatcgttttatgtcattcaagtggaaggaaaagatgaacaggcaaacaaacagttcaaacatttccagacccttgacacggaagaatttgaagaaagcgagctgaaggattttcttgacggggaattgaagaaaatcgtcaaacggaaagccgaacggcatccgcaatccgagcaagtcccaacaaaaatcggccattttatcacggagccgggccatgagcttgattcaaatccgaattacaaccttttcaaccgcgccagacttgcggatacgaaggaagcatttatcgaagcaagcgagcagttcgtccgcacttaccttgacacgagcgctgtgcgcggcggtgtttttatcgtggcatcggccgttccgcgcaagtattttgaagacaaattcgtctttatgatgaaatgcgatttcgagccgaaggtcgcccgcatctcagacgcctcgtctctcattaaaaaggtcgaaatggccatcacgacaaaaaacatgaaaagcattcaatatccgtatatgccggaagaaggcatgacggaagagcatgagctgaaaatccaccaggcctcgcacgcccgttatttcgaagattttctcaaatttgtcgaatacggcgaatcgatgccggaaatcatgaaaaaccaagtcatgaacatggtgcaggagcacgtgtatgaaaattttgaagaaaacagcgaagagcttcagcagtttgagcacgacattgaaatttgggaagcgagtgaaaagcgggaaattcaggagcgcctcgacacccatcaagtcatcgaggcatccgcgcagatcattgaacacacgccggaagccgagctgaaaatgaaagtcggagaaacagagattaaaggattactggctgatttcggtgaatccatccatctcgcaaaagtgaacgggcgctatgtcgcgctcattgaggcggaaacgatctcgtttgaaaaaggcagttcgccggtggagtttcacaagcctgaggggctgcatgaggtgattgaacggatacggaataaatctgaacaagactgacaaaagtccagacgccatgttctggactttctttatttaataaggctctttgagcaatcgatagcatgcaccgatgatgtcttggactccgggcgttccctttatctcgcggcggacgatttcagatgatagattctgcacctgtaatgcccgctccgcccgtctttcgaagtatgcttgacatgcagtttcatggttttcgtgtttttgcagttcttcactaagcacaatcgcgtcttcaatcgccatcgccgctccctgcgccaatgtcggcgctcctgcatggacggcatccccgcccagaacgacgcggcctctgtgccacggttctttgaccgccatctgctcaatcttatgaaacaaaacgggatattcctttgacatattctctgtcacaaacttcactcccggaattccgcgcagcaagtctttcacccgttcaaaacgcgtgtcctcgtcatccctgaagtcagcgtcatacggccggatgataaatacgtatcctgttttttcagagagcggcacgactccgacctgcgtctgcccttttttatacatcagtgttgaatcatgaaatatcggctcgggaaaagaaatgtaaaatctgtgcgctcccatgccgagatactctgttttcacttctctttgcagcatttgatcgcggacagcggagcggatgccgtcaaagccggcgagaatgtcagccgtcatcatggttccgtctgcacaatgcaccgttatttcatctgccgtttcttcgtaagacacgacttttttaccgagcagaatcgtgccccccgccgcttcagcatgctttttgaggatatcgtttaacgtttgccgcaatatattattccgccccggcaatgaatcatctaaaaacgcctcactcactttaaactgcagcgttccgttttcatcatgctgcttcagccattccgtttgaaagccgtgttgacagcattcatcatacacaccgatttcccgaagcacccgcagcgcattttgaggctggagaatgcccgctccgctttttcgcatgccggacgccgcctcgcaaagggtcacttcaaaacccgctctgccgagagaaatcgctgcggacaggccgccgatccctccgcccgctatgatgatctttttcacttcatggttcatcacgataccgccttctctatttatttatcacttattaactattagccaccttactatataggctgaaaaactgtcaatctttataagttgccttttgaatccggcaagcttatactttgaatcactaaaatggtacggaggcttacaaaaatggagttgagacatttgccggattactcgcagattgccggacgcgctgagatttacgccgatatggatgctgaatcattgaaaacatttttgacgttatttgatatgtctaaaaaaatgaatcaggtcatggagcattatttctcaagtcacggattgtccgaagggaaattcaaaattttaatgtttctgtttgacgcacccggacacagcctgagtccgacagagctggcgaaaaaatccaacgtcaccaaagcgaccatcaccggattgatcgacggactcgcacgggacggctttgtaaaccgcagccggcataccggcgacagacgaaaaatcagcatcgaactcacaaaagaaggaaaagaaaagctgatgctgtttcttcccggccacttctccaacatttcaggagtcatggaaagcttcaccgctgaacaaaaagcggaattgacaaaaatgcttgaagtattatttgataagcttctgctgttttccggcggcagaacataaagtagtatcgtaaaaacaaaggcaaatttctatgagatggaaattgaagtaaaaagatgagggttatacaaaacagcctgcacatttgtttgttcaggctgtttcagaagaaataattttaaaattactttctcttcactataaatgcaggtgttttaatgctggaagttacatttgtatatcgatttttagtcttcaacctcactctcacactatttgatcctttttttaacgatttttgatttgagagtttaaatacttttttaggtgttgagtgactgaaagaacctttctttgtttcattagccacccattttgaaccgttccaaacatcaattgtcatggaataatcaaatgttgcgattgtcccgcccccatatgatgctacacaatcaatggaagtagcttttgcagaataagaatccgcatcggtacaaactcttaatacatatgttgcataatctgtactacaaggcataatatccttcccctttcaaattttttgaaacaggcttgttattatgacaaaccctccgttcacttctagctggcaaacgtatgacaaaggggatctcatggcttaggagagtaaaaattcaaaactcttagaaattaacaaaaggcgcccctctcagcagggcgcctttttcgcgcggttaatcatcactgtttaaaattccgaaaaaccgtagcaggttgataaacaagttaataaagtcgatataaagcgtcaatgccatcaaaggaatcaggtcagccgtgatgtcccggtgcttgatctggttcagatcgtataagatgtacattgaaaacacaatcgtcccgatgacggaatacgccatcatggcggcggaattcagcgggctgaaaatattaaagatccccactgcgagaagtgcgataacagcgacgagcaagaaggaccataaaaatgacaagtcctttttcgtcttagcgccgatcgtgccgagcaccgcaaaaatcacaaacgatgaaccgaatgcctccaatacgacataggcccccgccgcggacgcataatggctgataatcggaaacagcgtcattccggaaatgaaagcgaatgaaaagacaaacacatatccgacggctttttttcggcgcagccaaaatgcggcgatgatcatgacgacctctaagaccgacagcggcagcatcaatgccggcggaatgaacttgcccgtatacaggccgattgtcgcaactaacagtgtaaacacaaataccgttataatgcgctgcataatagattgtttgctctcataagcagcagtttgcatgtcaaaagtcctcccaaaaaaatgatcttgataggtctattataaataaaatgggagaaatttgtatgattttaagaagattttaaggatgtcaggcctgacgttttgctgcgcattcctgcatatccatgaaatcatgcagttttttcgtcaagccgccgtgcccgaatcggatcttccccttctgccccggcgttttcgcgaaatcgagaaatgccagcacataaagacgcctgacgggaatcggaatgacgcccgcatcataaaaccagccgtcaattgtattgagcacgcctttgttaataccgtattgcttcgtgcaccaatgcagaaagcgcacttcgggcaggtgcagataccggctctcccggaaaggaacagttgaatgcttcatatgtaccgcctcctgtcattggctgttttttaagattgttttacttctttgctcttcagggaaaatcgatatttctccaccttatcaatttgtgtcacttgggaattatgaaccgtaatctgaactgtcccgaaatcgagcgtttccagcgcgctgataatcttttcgatcacatgcggatctacgtttcctttggacgtcatcatgctccccctttatgtctggccgttcgtcttttgacaatgagtgttttaattcatactattctgataagaaatatataattatactattatgttttcattcagaaatcaataacatttacacaatttttggatatgttttctttgcgaaaactgtcacttccttcgctttgatttaaaccgtgtcatcccgaaatcgactcccaaggcgtcatatagctgtttttaagaacgcaatcttcaagttccgacatatttacattgttttccgctgacaaaaaaagcgccccgcctctggacggagcacccttttttctatgcttttgcttcctcgatcacacatgtgacacccatgctggcgagcgcctgctccagggagccgtaagtttgatactctgaaaaatcaagccccaattggatagaagtctgtgccacatcaggccgaatgccggaaaacacggttctgatgccgaggagaaataacgttttcgacagcatatacaattgctgcgccaccatcgtatcgacaatgggcacaccggacagatcaatcacaaggtttgtgatccgtttggcgacacagttttccggcaccgactccaaaatcacgcgtgcccgtctcgtatcaatcgagccgatgagcggcagagtgccgatcgtatccgcgatcaaaataaccggacagctcaattcggaaataagctcctgctgagatgacagcctcgcgatcattaatttctgaaactgttcagtaaaatccgtcatcagctgatcaaacgagccgttgacaaggtgattccagcggcgggcatcctcgtttgttacgatgtcctgatgctcatccataaaacgggtgaccgcctcccaaaagacggttcttgaattgccgatcgcctcaacgacctcatgaacctccgcgtcttgctccactctgcttttcgctacctgtgcggcccatttttctttgttatgctgaaaaacggccggatcctccaaaaaagcgcttgcgatgaccgtgtttgtaaaggtatgctgctcgatcagcagccgtttcatttcctcacttaattgatccgcagaataaaaacgccctctcagcttccgtctcagcttgagccatttttccgtcagctctgccgaatgtgtaataatataatcatgaagtaattggtctttgttcactgccgtctcctctttcaagaatatgtacttttgtctaaattataaatcggaatcgccgatcgtactagagaaattaaaaaaagcctgcacattaaagctgttgattgcttttttcggcaggaggatacactataaaagaaatgaaacaggaggtcagtatgatgatcaaaaaaatcgcaacagtcgccgtatacactgatgatcagcaaaaagcgaaaacattctggacggaaaaagcggggtttgaaaccgtagccgagcatccgatggacccgggcgccttctggcttgaggtagcgcccaaaggggccgccactcatttggtgatttatccgaaatcaatgatgaaaggggccgagcatatgaaggcttctatcgtatttgagtgtgaagatgtctttgccgcatacgaacagatgaaaaagaacggcatcacctttttagatgaaccgaaacaaatggaatggggcagcttcgtgcaatttaaagatgaggatggtcatgtctttctcctgaaatcgtaatccgtcaggcatctcaattgactgtgagaatcattttcatttaaaatgttggataaagcgtgaaaaggattggagagttgccagatgttcgtgcaaatcagaaaaatgaccgtaaaagaaggacatgccgacaaagtaatcgaacgcttcagttcagaaggcgtgattgaaaagcaggaaggtttgatagacgtaacggtcctggaaaaaaaagtccgccgcggtgatgaagaagtcgtcgtgttaatccgctgggagtcagaagaccattggaaacaatgggaaaaaagcgaagaccacatcgcggcccacaaagcaaaccaaggcaagccgaaacctgattatatgcttgggacggatgtcggtatgtatcatgtcagagccgttaaaacaggcgtacacgaaaaataataaagagcatttgccccagggcaatgctctttttattttttctcctcatacggcaggacaaacagcggtttatcgggcttccattccgcatacagcacgtcctccgttcttttgatgttcagctttttcagctcctgagtcagctgcttttcttccagcccggcttctttcagattttcatacagcacttcgccgtcaataatcagcgtgaccggcaaagagacctgcttcggctttatttgcatgtcgccgtttttcgtcgtgtcatattgaaatttcggcaggacactgaccatcccgtttgtttctaaaatcgcgtactccgcttcctgtatggaaaagcaattcgcctgtctgagaaggctttgcaattgattaatgtccagcttattctttttcagcacatcatatttcagttttcctttatgtatgataatactcggctcgccttccaacagctttctggagctttttactttctgcgtaatcagttcgatgagataaattaaaaccccccataacagagaggcaaaaatgatttcaaaaatcctgacgcctttatcatacaccgcatttccgaccagttcgccgaggatgagcgcggaaataaaatcaaacggcgtaatttgcgagaattgagtttttccaagcaattttaaaatcacaaataaaatacccaaaccgcatactaactcccaagccactgtaagtaaatgtcccatattcgcaccttcttcttaaaagtcattaccattatggacattcgcctgttttctatacagcggccggcaacacacaaaaaaacgcagccgaggccgcgttttttcacttctgcttactgtttttgattcgatctgacgacccgtaagcacacctcagcggcataaccggcagccgctccggaacccgcaaacatcgcggcaagccccaagcccattccttcccagccgccgacaccgaaaatgctgtaaacaaccgtaccgaaagcagtcaggcccagcaccgccaaaaggcactcaggccacatctttttcggccatttcttgcggagcacagccgatacggcaaagttaagacaaaatgcggccagacagatcagaaaaaaaaaccccatgtcttttgcacctccgtcatgagtagctttttatttgctcacctttttttcaaacaaatgataacccggcgcgggtccttttgattcgtaccccattccgctgtaaaacgactgaagcgccttgttttcggacacgcaatcgagccggattttcgtttttcccggacaagacacacccgtctccgcccaagtcatgattgtccggccgagccccgcccctgcaaaccgcctgttaatcgccagccggtggagatatacggactcctcatgtccttcatcgccccaaagacgtctgtcccacccgcttgcttcgggaagcagcatgacgacgccggccagctcttcattctgcctgaataaaaaaacatacccttgggcgatcgcctcccgcatattgtgggtatcttccccttgcagaaggccgctccactggttcgaccctttatcgcgaagccattctgccgcttgcacgagcagatccatgacctcttttgcatcatctttccgggcgggggtgacccggaatgcccccgccgtctcctccgtaatcgtaaaaggtgtcataaaatcctcctgtaatcagaatattcgacacctttattatagaccaaacgcagaaaggaaaaaaacagccatcgtgtttgagggccgtttaaaaaattttcttcttatcacgttcttcttttaaaatctcaaccgcttccctgaaacgcatagagtggacgatttcacgctcacgcagaaaacggagtgaatcattcaggtcaggatcatcggaaatatcaataatccattgatacgtcgctctcgccttttcttcagccgcaatatcctcatataaatcagcgatcggatctcccttcgcctgtatgtaagacgctgtgaacggaactccggccgcattgtgataaaacagcgcgctgtcatggttgacgtaatgatcactgagccctgcatcacgcagctgctccggggtcgcatcttttgtcagcttataaatcatcgtcgcaatcatttctaaatgcgcaaactcctccgtgccgatatccgtcagcaggccgatcaccttgtcaggaatcgtgtagcgctggtttaagtaccggagcgctgcggccaattcgccgtccgccccgccgtattgttcaatgagaaacttagccagcatcgggttgcatgtactgactttaaccggatactgcagctttttttcatatacccacatttacagatccctccttatacttgccatggccaaggaccgcggccccagtcccattgagcgccgacctgactcacgccgaattgcagaagcggtccgtactcaggctcaaaccgctttctcagctgtcttgagtaccgggaatattcatgaaactgctgaagcgcgagacggtcatggggatgcgtatccagataaagcgtcagctccaccaagacaaagtccgccgcctgaatttgctccagcagccgataatattcatcatcaatctttttcgccatattcgattcccccccgataaggattatcatagaaatcgtaaagatccttccaaagggtcccttttctcaatgcctccatcggagaaaactgctctaagtgatacggctgaaaccgcatataaagatgcggcggcgttctgaagtattttctcccgatcggcgggcagggatcaaaccggctgtggaagggtttataggatttgaccggtgtaaacggctgattttctttcattacgatcctcctttcctaaacacatgaccttaataggtatgaatccgtatcggcatttatgccctgtaagaaaataaaaaagccagcgcttagaaacggtcacaaaaaaacactcttgctgttccaagagtgcttttcccgaatggtcagatatattggctgtcccgatgatgatgatgatgatagaacgggtagccgccatagccgccaaaaccgtaccccggatatcctccgtagcctccgtagccgccgtagccgccaaaaccgtaccccgggtagccatagccgccgccgaaaccgtatcccggatatcctccgaagccgccgtagccaccgtagcctccgtagcctccgtagccgccatagccgccgccgtaaatcggtcttctttcattcatgatttatcgctccttcacataggttacagtccagtttatgacatgcggaaggaaacgtatgggcatccgcccagttttggcgaaataatcaataattgcttacggagaaatacgatacaggccgaccgcataagcaaaattaaaaaggccggaacttatgccgccccggcctttttgtctttattcgcctaaatctacattgtgataaacctgctgtacgtcttcgaggtcttccagcacatcgatcagcttttcaaattgagctttcgcatcttccgggagctcgacttcattttgcgcaagcatcgtcagctccgcaaccgtgaactcttcaacgccggcatttttgaatgcctcctgcacggcatggaattggtcaggctcggcatacacgatcacactgtcatcctcttctaaaatatcgcgcacgtccacatcagcttccatcagcaattccagcgcttcatccgccgtcttgccttcaacgccgataacggcagtcgcatcgaacatgtaagcgacagacccgctcacacccatatttccgccgtttttcccgaatgcggcgcgcacttcaggcgccgtgcggtttacattattcgttaacgcatcaacgatgatcattgaaccgttcggcccgaaaccttcgtaacgcagctcgtcaaagttctcctccgcgccgcctttcgccttttcaatcgcacgctcaataatatttttcggcacactgtacgtcttcgcgcgctcaagcaccacttttaacgcctggttcgattccggatctggctcgccttgttttgccgccacataaatctcacggccgaacttcgcgtaaatccggctcgtatttgcgtccttcgatgctttcttttctttaatattgttccacttacggcccattttgttccactctctttcacgaattgaatctgtatgataaatactctgcttctattatacctcagcggttgggttgtttcgagtgtaagacattagaaaaaaacaggcacgcttaaaacagtaagccgaatgtgagggttattatacaaaacataaaaagcctcccttcatacaggaaggaagtcgcaagccaaaagattcattttattcttattacctatttcctacactgtatatcctgactcacgtggtaaaattttgatatcgaacaaaagaaaggatatggtcatgaaagttttcgaagcaaccaccctcctcgccgccgccaagcagcgcgcgggtgaatacaaagaactccgcggccaaatggtcaatctgaaaaaagcgtttcaaggtatggctgatcttggtgacaatgatttctcaggccggggcgcaaataacatcaaagctttttttaaggaccacgccggcgtcacagacagctggcttgatctgatcgacatgaaaatcgcatttctcacaagccttcccggcaaaatcgaagacgcaggtctttccggatctcatgtagaagaatcatttctggagcacgagctcacccacgccctcagtaaatcaaaggcaattatggaagagcagaaaaaggacatgcgctccatcctcggtgagatcgatgacatcatctcgcttgatctattttcaacggaaagcacagatcagaagctttcttcagctatcaaaaaaagaagcgaaacgatacataagctcggcaagcttgatcacgatctaacgaaagaatacgcagaaaccgaagcaaatgaacattttatccaagcagatttccagcagctccaaaacgctacaggcaaaggaaaaaacgccacgccgcttcactacaatgccaaggcgtaccgagaaagcgacatccataagaaaaaagacgagatttcaagacattcggatgcttatttgacgattaaaaaggaagaagcgaaagagcgtgagattgaaaaactgaaagaaagactgaaaaactacgattatgcgaatgccgatgaattctattcaatggccaaaacgatcggctataaaaacctgacaaaagaacagcagcgctacttcactcaaattgaaaacacgcgtgaacttacagacggtttcaaaggcgttgccgtcggcctttatgattccggaaaagacgcggtcacaggcctgtgggatatggtcacagatccgggcggaacggttgaagccattacaggagcggtggctcacccgatcaaaacgtatgaagccatttcagcggcaatcgaagaatcataccaaaaagacatggtgaatggcgacacctactccagagcaagatgggtgtcatatgcagtgggcaccgttgtgacatcagtcgtcggcacaaaaggcgtcggcgccgtctcaaaaacaggcacagccgccaaagtgacaaccaaagtcaaaacagcagcaagcaaatccgccacagctcaaaaagcgataacggtctcaaaacaaaccgttgatcacatcaaacaaaaagtaaacacaggcatcgaagtatcaaaaaaacgcgccaaaaccaagttaaatcaaatgggagatctcaccctggctgatattctcccgtatcatccgcgtcacgacttagtgccggcgggcgttccttacaacgcagtcaacggggtcacacttaaagaaggacttcagaaattcgccaaggtcatcctgccgaaaccgtacggaacctccgcaagcggcagacggacaccggcaccgcatgtaccgccggtaacggtcaaatacggcgagcattttgcgaaatggaccagaaagaaagtattgaagccgaatgtcatctacaaaacaaaagaaggctacacgtacaccactgacaactatggtagaattacaagtgtcaaagcagacttgcagctgggagaagcaaaacgcaaccaatatgcacagtcaaaagcaggtaaaccagaccgtctgacagatgacgacggaggccacctaatcgccacccaattcaaaggctcaggccaattcgacaacatcgtgccgatgaactctcagattaataggagcggcgggaaatggtatgagatggagcaagagtgggcaaaagccctaagcaaaaaaccacctaaaaaagtagcagttcaaatagaaccagtctattctggagattcacttagaccatcatatttcgatgtaacctacaaaattgggagcagaaaagaaataagcgtctctattaaaaatcagcgagggggttaacctaatggaaactaagagaatgcaagatttatatcaacttattggagaaaaactaaatgacattatacctggtgaatggacaaagatatatctttatgcagaagtattagatgattccacaatggttctttttcacttcagaacacccgaaaataatcaaattatttattcacaagatatacctagccattacaacgtaagcaaggacattttcaagacgttgttaagagaactaagagaactttttgaagaattaaaaactgaacacagaaataataacgatgatgtttggactaaccttacactaacattggatcgtagcggagaattccaattagattataattatgatgatattttagcatcagatttagatggatatgaaagaatcgcaatatgggaatatcaaaacttggggattttgcctgaagatgaggacgataaagaatttgtaataagctacttcggtctataaatcaataatggcccagcgcttctctgctgggctattttttataactaggatttttcgacaatcggagttgaaaagattggaaactaaaaaaatgcaagatttgtaccagcttattagtcagaaattaaatgacatcataccttgtgaatgggcaaaagtatatctttatgcagaagtattagatgactctaccatggtcctctttcacttcacgacaccagaaaaacatcaacttatttattcacaagatatatctgcccgatacagtgtaaataaaaatatcttcaacacttttcaagagaaatccgagaactctttagaattgagcacaaaaagaataatgataaacaaaacaggcagcatccagtaaacggatgctgcctgttacatcgttatgtatcgtctgaggaggtcatttattttgttttttaaatatgaaaatagatatgacggtaaatatgatggctgtaatgacaatgacccacaagctcgcagccgtactgataaaatggccgtttaacttgtagacgatcccgtaatgcttttcatattcctgtatttggtccgcagaagcatgtttaaatactttatcaactgagtctgtcataaacgcttttctgaacagaacagcggtgtggctgatagggaaatacataataatcttctgcacaaacaccggtacgccgccgatcggcacatatactccgcataaaaaaccgatggctgttccgacaatcgtacttaacgtcgaaaatgcattttgtgtgtgaataaacagcgttaaaaataaattaatggagcttgacagtgcaactgaaagaataataatccccaatacttcaagtatatctgtaccgcttaaaagtttgctgcctgatgaaacgagaaaaatttcacagcctaaaaaggcgatgaatgaaaagatcaagccgatgacaaatgaatgaatgacatagctcaattggatggtcgcccttgataaaggagctgttaaaaagtcatacgttctcttgctttctttatctttcaccataattccgaaagcgcctaaagtcgttgtcacagctgtaatggacagcaatcccgccaccatccattcgttcaccattgctttggaatcatctgtcgaaccgaccaaggccttaatggcgtccagctgtgtctgctgtaagaacacggcatataacagaatgacgataaatactgacagcaaagaaagaagcaaaagagttcgatcacggaagtatatttttatatttctgctgattaaactggataaagacttcatttatgcaatgctcccctttactggcaaactgcttccttgttcttcgataatatggataaacacatcatccatattccctttaatcacctcgaaagattcaatttttccttcaagacctttcaaaatgtcaaacgcttggagagtggactctacacgaagggaataaatagagtttttaaccgtaaaatccagttgtttattttcaaaccatgcagtcggatcaacgccttgcttaaacatcatatgcagactgtcaaacgcatattgatctttcagctgactcggtgtaccctctgcgatcagacgtccttctttgatgaccacaacgttatcagccacagcggcctcctccatgtaatgggtcgttaaaaagatcgtcatgtttgtttcttcctgcagccttttaatcgcattccaaacaaaaactctcgtttgcggatcaagacctgtagtaggctcatctaaaaataatattgtcggtttatggatgatggcacgggcaatatctgctcttcttctttgtccgcctgacaaatcgctgtattttttctccttaatatcatccaattttaaatagtctgttacaaactgatagttctcttgcacttgtgccttgcttaaatgataatattgtccgcggttcatgatattttcataaacggtcaatcgttcatccaaaatgctctcttggaaaacaactccgatctttttgcggatatgattattctctttcccctcaccaagcgtataaccgtctattaccacttttccggatgtctttttaatcagcgtacagagaatatcgatagtggtcgattttcctgcgccgttcgttcccagaaatgcaaacagctcgccgcgtttgacagaaaaggatacccctttcactgcttcaaatgatccatattttttacgaagatccgttactgtaataatgtcttgttcttctcccattctgttcacctcgaaaagtaagattctataccgttgttcactaactttatatcgtcattcccgccaggattttctcatttttatccaactttattatctttttataaataattataacgatataatttattattttcgcgttttgttattgggtttaggctcggtggattttctatacatagggatcacttattgattttgcatgaaacttatacatgctgtaatcaataaaccctttatcataaaaagggtttttattggttaagaatctctaatactatttaaaattcttgtttgtaaccgaaatacatattatcttagaatattcagaaaggagaacgtaatggaaacatgcccttattgtgcaacttcaattcaaaaggataatcagtattactgtagtttttgcttaatgtacatacataatgttcagagagatggcaaacgtgaaatcatagaatatcgtgagcatacttctgaattagatttggataagtctacaccagaactaatgactctgccaacaattgaattatttcatttactgcggctctcaagaaaaatacgcaaacagaagtatgatcagctatataaatctcgacttgaatcagaaaagggaaatgaatcagaaaatgttcaaatcgcaacggatagttaccaatattacacaaagaaaatgtatatcatagagaatatattaaataaacgtctgggttacattccggataggatagataatgtatttcttaagagttatttagaaaaagtaatgattagtaaggagaaaaaacaagatatgaaagtgtattaaaaaagctgcccctctagagtgaatattaataaagggttcctaaaaaggtaccctttattacataaagaggtgtatagaaagctatattataggcgtcaaccaaacatcttctggtactcctctcatgtcacgagttcgtcctgaatgcaaaaaaaatgcggattaaaaaaaggcaaccatccctaagggttagttgccttctcttaattccagcacagccacacactccacatgattcgtatgcgggaacatatccacaggctgcacttcgcgcgtcacgtacccgccatcctcaagcacccgcaggtctcttgcaagcgttcctggattgcaggatacgtacaccacccgcttcggtttcatctcgatgattgtccgcaggagggcttcgtcgcagccttttcttggcgggtcgacgacgagggtgtcggccgtgataccttctttataccatttcggaatgacggtttccgcttctccgactgcgaattccgcgtttgtgatgccattcagctcagcgttgcgttttgcatcctcgatggcttccggcacgatttcgacgccgtatactttcttcgcctgcttcgccagaaatagagaaatcgttccgatgccgcagtaggcgtcgatgacggtttcttccccttgcagctccgcgtactcaagcgctttgtcgtagagcacttttgtctgttccgggttgacctgatagaacgatctggcggagatggcgaatttgacgtctccgatgaggtcgtagatgtattcttcgccccagatgacgtttgtttcgttcccaaagatgacgtttgttttgtttaaattgatgttttgcacgatcgatttgacgtgcgggaattgcgccgtaatgtcttcgatgatcttcgctttgtgcggaaaatcgcttgttctagtgataaagacgatcatcatttcgcccgtgacgacgccgtatctgaccatgatgtggcggagccagcctttgtggcgttcttcgttataggctttgacgccgtatgaggcgcaaatgtctttgacggcttgaacggcttcgtcgtttttggattgctggatcatgcaggcgctcatgtcaatgatgtcatggcttctttgctgatagaatccggcgacgagtccgccttcccgttctcctaccggcacctgcgctttgtttctgtagttccacgggtcttccatgccgagcgtcggatgcacgatgacttttgaaaggttcagcttgccgatccgttctaagacgtctttgacttgtttctgtttaaacaagagctggccttcataggtcatgtgctgaagctggcagccgccgcattgtttgtagattgggcacggggcatccgttctgtgcgggctttcttccttcagctcgattaagcggccgaaagcgaagccttttttgacgcgtgtcactttgatttgcgctttttcctcaggcagggcgttcggcacgaaaatagggaagccctgaacctttgcgacgcccgctccttcgtgcgtcaaatcctcaaatgtcacatcatagtattcatttttttctatcgggggtttcattttcatctataatcacctctagttttaccaatagccttgtttcagcgtgctggcaaaccttcaaattcaatgtcagccttcaaaggtttccgatcacgctgaaaagatgacaaaatcctaaaacgaatactgttttaggattttgtccacgtattaatcatccagctgttccgctttctccttcggcatgatgacgtgaatatgccggtacaggttcacgaattcgcccggcagcatgccgccgtactcgccgtccaggttcagctgcatcttttctgatacattgactttcacacggttcgcttttgtgtaaataatgtgctgatcgttaatatgatcgcctctgagcgccatgctcgcgactctgataaactccgcgagattggcttttttcaaaataattaaatcaaacatgccgtcatttaggctggaatcaggggccagcttctcgaatccgccgaccgagttggtcagcgtcactaaaaacagcataatttcgccttgaaacagcttgccgtcatattcaatctcgacttctgtcggtcgaagtgaaggcagcatttccattccctttaaataataagcaagctggccgagcatcgttttcagtttgctcggcacatcatacgtcagctccgtcagacggcctccgccggcgatgttgataaaatactgaccgttcacctgtccgatgtcgatcgggcgggctacgccgttaatgacggtatcagcggcattcagtatattctctctcggaatgcccagcgctctggcgaagtcatttgtcgtgccgaccggaatgatgccgagtgtcgggcgtttgtctaacggcgcaaggccgttgacgacttcattaatcgttccgtctccgccggctgcgataatcaagtcaaactcccgcaaagcggcttcttttgcggcgttggtggcatcccccgcgcatgtggtggcatgggtggaggtttcataaccggcttgttcaaatttttgcaggacctgggcaagatttttcttaaaaagctcccgtcctgaagtcggattgtatattatgcgtgcacgtttcattatctcatcatcctacttaagagtatccgatccattattaacactaacaacctttaattatactatgacttgagaaaatcgcaacaatatgtacagaaattgccagaagaaaaaaggccccggctccgtttaaggagccaaggcccgctgtcttactcttcttccgttccaggttttttcttacgaaatttcgctaatacttcatatacgatcggcacaatcagaagggtaagcagagtcgaactgattaaaccgccgataacagtgacaccgagtcctttagaaatgacctggcttccgccttcgaagcccaatgccaatggaagcagggcgccgattgtcgcgatcgccgtcatcagaatcggacgcaatctcgtagagccggcttccaggagcgcttctctcgtcgataagccttccgcttctttatggatgacgcgatcaattaagacaatcgcatttgtgacgacgattccgatcagcatcagcataccgatcatggcattcagactgatcgtctctccggatacatacagtccggctaatgcgccgatgactgtaaacggaagcgagaacagaatcgcaaacggcgctaatgctccgccgaacgtgatcacaagaacgaggtatacgatggcgattgcggcaagcattgctaagccgagtttcgtaaaggaatcagctatatccgctgatacaccgccggtatcaatcgatacattgtccgggtgatccagtttgtcaactttcttttgaacggctgatgacaccttcgtgacgttgtcagaagtgacggttgccgttacgtcagcgtacactttgccgtcgcgtttggaaatggtatcggatgtcgtgccgtttttcactttcgccacatcgccgatttttacttcttggcctgcaggcgatgtgatggttttatcctctaattcttttacactcttatactggtctttttctgttttgatgttcacatcaagctctttgccgtcctttttcaccgttgtcaaaggagactgtgacgtttgggacatcagggcttgggagatttgcgaagccgtcaggcccttcttgctgagtttctcctggtcagcgacgaacgtgtactcatcatatgtgctggaaaggcctgagttgacgtctttcagatccttctgctttttcatgatgccttcgatgtctttgaccgtgcctttaatatcagactctgaatctccgtacacatagtacgttaattcgttgttgttgcctgacgaactgaaattttgtgatttccattcgccgcggctggatgtttttttgatttcttttaagacattgtctttttctttgtcaaaatcaggcgtgtcatcctcgtatttcacgtagaacaatgcgccgtttaagcttccgccgagcggactttgcgagcctaatgaatactgaacggtatcgacatgtttgcgtttaagcagcatgtcttccgctttttgcgcagctttttcagcttcgcttttcgtttcgcccggttcaggcgtgtatgtgagctgcatcgttttgtccgcttgcgcaggcaggtagctcgcgccgatcagaggtacgaggaacaaactgccgacaagcatcagaaccgcgatgatagatgtaatccatttatgtcttaatgaccaattcagcacttttttatagaaattggccaatctgcccggcttatgctctttcgctttaacaggcgcgcctgtgagcgattttttgaataagctgtgcgcaagcatcggcaccagtgtgatcgaaatcaacagcgatgcggcaagcgcgaagacgattgttaatgcaaacggcataaacagttcgccgatctgtccgccgaccatggcaagcggcaggaatacggcaatggttacgatcgttgatgacatgatcggtttaaacatttctttcgtcgcttcacgcaccaattgcttcccgcgtaaaggttcatctttcagcctcatgcggcggtaaatgttttcgatcacgacaatcgaatcatcgactacccgtccgatggcgaccgtcatcgcaccgagcgtcattatgttcaatgtgacatcaagctgattcagcacaagaagcgcaatcagcagtgacagcgggatggaaacgatagaaatcatcgttgatttaatatctcttaagaataagagaatgatcacgaccgcaaaaatcgcgccgaaaatcgctttgcttaacatcgtatccaccgactctgtaatcggctctgccatatcaagagtcgagctgtacttgaaccctttatggtcttttttgtattgattcagttcatctttaatcgcatcggccacttctaccgtgttggcgtcattggcttttacgatattaattccgatgctgtcctttccgttcgtgcgggaaatggattcagcttttttcacatctttaatgtcggcaatgtcagaaagcttgactgtcggcacccctgctgccgcgctttgctgtgcctgctgcatagcctgagcgtccgccgcagatgccgcaccggctccgcccgtttgaccttgagcggcagaagaagatgtgaccggaattctcatatctttcagatctttaattgacgtaatatctccgttaacgacaactgatttttctttgttgccgaacgtgtacaatccaagcggcgtattgacgtcagagccttggatcactttcttgacggtatcttcatcaagtccgtactctttcatttttttgtctttgaaagagaattccacctgctcttcctgctgtccggaaacttgcacggacgcaacgccctgaatgccttcaagcttaggtacgagagtgttttccacatttttggtcaggtcttcaagcgagcttttgccgcttgtcacactgagcgtcaaaatcgggaaagagttgaggctgtaacgggaaatgtcaggttttttcgcgtcgtcaggaaggctgacactgtccagcgcttcagcgacttcggttttcgccttgtccatatccttgttgtaatcatattcaatcataaccgatgagacgttttcagaggatgtggacgttacgacgctcactccttctaaattctggaccgcctgctcgatcggttttgtcacgtcatccgcaacttgactcggagcagctccgggataagtcgtatttactgaaaggtaaggcatgttgacgtccggtatggattcctgcttcatattcagaccggcatacagccctgctacagtaacgataatcgtcatcagccaaactgcgaatttgttcttcagtacaaagttaataatgtggttcatcatgtcctccgttaatttttattgactgactggtcattctatataatactaaacggtataactcaacatcgtcaactaataaggcagtaaatttttctaaatttttcaggattaaggggaagcacgtcatgaacgaaaaaaaagagaaaatcataaaaacaggcatccatttatttgccaaaaaagggttttcttcaacaaccattcaggaaatcgccggtgaatgcggaatttcaaaaggggccttctatctccatttcaaatcaaaagaagaccttttgctctcagcatgtgagtattacatcggcatgtctatggaagaaataaagaaaatcaaaacagaacatcaacataaaccgcctaaggacgtattccgaaaacaaatcgcatatcaattccaggaatttatggaacacaaggactttatcatcctcttgctgagcgaaaaggtcattcctgaaaatcaaaaggtcaaacagtattttcatgaggccaatattcaatttaacatgctgtatcgggatgcgttgctctccgtttacggagatgccgtcacaccgtttttagcggatgcgtccgttatggcgcaaggaattgtgagctcctatattcatttcttgatttttaatgaacatacggcattccggacggaaaacgtggcggcctttctgattgccagaatcgatgatctgattacggggctgataagagacaatcccgatccgctgctgcctgaggatatcttcactcagcccgcggcggacagagaaagactgcttgcggatattcaaaagattaaaacacagcaggagctgcctgaggacgtcctcgtatcgcttgaagtcattgaagaggaatgtgcaaaagaagagccgcgaaaaccgattattaaaggaatgctgtccaacttggcaggcagcggaaatgagcagattgaaatgctgcgggcttccattgaaacctatttcagcttataaaaaaaaagagaccggcgcttaccggtctccatgtcagcagcgcccttacaggcggctgcttttttttatcgttttttgatttcttcaagtaagatcttgttgaccatcggcgggttggcctgtccttttgaggctttcataatctgcccgacaaggaagccgatcgcgcggtcttttccgtttttgaagtcttcaattgactgcgggttgctgtcaagcgcatctgttaccagcttcagaagcacgctttcgtcagaaatctgaacaaggcctttttctttgacgattttttctgcgtcgccgcctttttcaattaattctttaaagactttcttcgcgattttggacgagatggttcctttttcaatcagcttaatcatgccggcaaggccttcaggagtcagtgcgacatcctcaagctctttttgttcggcgttcaggtaagctgagacttcacccatcagccagtttgatgcctgcttggcttctgcgcctttattgaccgtttcttcgaagaagtcagccatttctttcgtcagcgtcagaaccattgcgtcataagccggcaggccgagctcttcgatataacgcttgcggcgctcatccggaagctcaggaatggttgctcttacgcgttctttccattcgtcatcaatgtagagctcgacaaggtcaggctcagggaaataacgatagtcgtccgaaccttctttgacacgcatcaaaatggtttttttcgtcgcttcatcgtagcggcgcgtctcctgctgaatgactccgcctgacagaagcacctgctcttggcgtttttcttcatgctcaaggcctttttgcacgaatgcgaaagagttgaggtttttcagctccgtttttgtgccgaatttctcctggccgatcggacggagggaaatgttggcgtcacagcgcagtgaaccttcttccattttacagtcggaaacacctgtgtattggataattgatttcagcttttcgagatatgcgtaagcttcctccggtgtgcggatatccggctcagatacaatctcgacaagcggcgtgccctggcggttgaagtcaacgagggaatagccgtcgcccgtatgcgtcagttttcccgcatcttcttcaaggtgaagacgggtgatgccgatttttttcgtttttccgccgacttcgatttcgatccagccgttttcgccgattggcttgtcaaattgagaaatttgatatgccttcgggttgtccgggtagaaatagtttttccggtcaaacttcgtatccgttgcgatttcgcagttcaaagccattgcggctttcatcgcgaattcgaccgcttctttgttcaaaacgggcagcacgccgggatagccgaggtcgatgacgctcgtttgggtattcgcttccgcgccgaatggcgtcggtgagcttgagaaaattttagattttgtttttaattccacatggacttcaagtccgattaccgtttcaaagttcacttcatttcaccccttacagttcaggtttcgctttatgatgatctgttgcctgctcaaaagcatgagcgacgcggtatacagtgccttcatcgaagtgttttccgatgatttgcagtccgagcggcagtccgtccgcaaatccgcacggcacgctgattcccggcacacccgcgaggttgacagggatcgttaaaatatcgttggcgtacattgtgagcggatcgctggttttttcgccgattttgaatgccggtgtcggcgttgtcggtccgacgatgacatcgtatttctcaaatacgtcttcaaaatcttttttaataagcgtgcgcactttttgcgcttttttgtaatacgcgtcatagtagccggagctgagcgcgaaggtgccgagcatgatgcggcgcttcacttcgttgccgaagccttcagagcgtgtctgtttataaaggtcgatcaggttgtccgcattgtctgagcggtagccgtagcggatgccgtcaaagcgcgcaaggtttgcagacgcttcggaagaagacagcagataatacgtcgcaagcgcgtatttgctgtgcggcagagatacttcttcccatgtcgctccgaggtcttcaagcacttttaaagcggctaaaaccgattctttcgcttctttgccgacgccttctccgagatattctttcggtacggcgattttcaagcctttaatatcgccagttaatgaagaaagaaagtccggcacttcgacattggcgctcgtagagtccattttgtccgggcctgaaatcgcctgaagaaggaatgcgttatcttctacggttcttgtgatcggcccgatctggtccagtgaagacgcaaaagcgaccaaaccgtaacgcgacacacgtccgtatgtaggctttaatccgacgacgccgcagaaagaagccggctggcggatggagccgcccgtatcagatccgagtgaaaacgggacttcgcccgcggcaaccgcagctgcggaaccgccgcttgatccgccgggaaccgtatcgagattccaagggtttttcgtcgctttgtacgcggagttttcagtagaagaacccatcgcgaactcgtccatattcagctttccgatcgttacggcttcagcggcttgaaggcgctccacaaccgtcgcatcgtaaatcggatcgaagttttcgaggattttgcttgagcatgtggtgcgaagccctttggtcacgatgttgtctttgacgccgatcggcattccgaagagaagaccgtgttcagaccgtccgtcaaccgcttcgtcaagttctttcgcgtaagcgcgggctctttcttcatcaagctgtaaaaacgcctgcaccttatcatccacggatgcgatccgtttgtaagattcatcaacaagatcggaaatcttgatttcttttttatgtatcatttgtttcagttctgtgattttgtgatcaaataatgacatactgtctccctcctttaatccagaatagatggcacacggacatagccgtctttatgatcgggagcatttttcatgacatcctcgaccggaaggcctttacccgcttcatcttctctcattacgtttttcattttcagcacgtgtgttgtcggttccacgttatccgtgtccacttcattaagctcctcggcaaacgagatgatgctgtcaagctgttctgtaaacatttcagcttcttcatccgtaatggcgagtctcgccaaatgagcgacatgctttacttcttctatagaaattcgtgacataagatccacctccgcataattctccgtttcgtcatataatactgatcatatcaaaaacgagccctctaaagcaacaaaacgccgccttctgaggcatgatgaaaccctctctattttatcctaaatcggggagaaagagaaacgaattatatgtcagaaaatttttacttttataatttattggtagcgttttcatctctaagctgttctatgttggcggggattttttccttgagcgggccaggtttcgagagttgattgatcggggatactttgttaggtttagtaaccatagccagcactaaatcatgcgatccgcacggaatgatgactaaaggctggatcgccggcgcatattccggcactactaatctacagaggtgatgcaacatttacatgaaagaagagagggtccaaaaacgtgagtattgaattaattatatctcttggcatttactttgctgccatgctgttaatcggctggtacgcattcaggaagacaacgaatattaatgattacatgctgggcggaagaggacttggcccgttcgtaacggcgctgtccgcaggtgcggccgatatgagcgcatggatgctgatgggagttcccggcgcaatgttcgcaacggggttatcgaccttatggctggcgctcggtttgacgatcggcgcgtattcaaattatctgctgcttgctccgaggctgcgcgcttacacggaagttgcggatgatgcgattacgattcccgattttttcgataaacggttccgccactcgtcatcattgctgaaaattgtttccgccgtgattattatgatctttttcacactgtacacatcgtccgggatggtatccggaggcaggttatttgaatcggcattcggcgccgactacaaattcggtttgtttttaacggccggtgttgttgtgctttacacgctgtttggcggtttcctcgctgtcagtctgactgactttgtacagggagcgatcatgtttgcggcattagtgcttgtgccgatcgttgcttttacccagctcgggagcgtttcaacgacgattgattcgatcaacgccgttaacccgaaactattggatatctttaaaggcgcgagcgtcattagcattatttcttatttggcatggggactcggctattacggccagcctcatatcatcgtacgatttatggcgattaaagaagtgaaagatttaaaacccgcccgcagaatcgggatgagctggatggttatttcagttgtcggttcattgcttaccgggattatcggggttgcgtattctcatcacttcggagtctccgtaaaagatccggaaacgattttcattattttttctaaaatcttgttccatccgctgattacgggcttcttgctgtccgcgattttagcggcgatcatgagttccatttcctcacagcttctcgtaacggcaagcgccattacggaagatttataccgcgcctttttcagacgggaagcgagcgataaagaattggtcatgaccggacgcctgtcggtattgatcgtggccgttatcgccattttgctttccatgaatccgaacagcaccattcttgatctggtcggatatgcgtgggcaggcttcggttcggctatcggcccggcgctcttgctcagtctgtactggaaacggatgaatgaatggggagcgcttgcggcgatgattaccggggccgcggccgttttaatctggatcacgacagggcttgccgcttcaaccggcgtatacgaaatcattccggggttcttcctcagtctgattgccggtattgccgtcagcctgctgaccaaaaaaccggccgatgcttcttatcagctgttcagccggatggaagctcttttgaaaaacaagaaatagacaaaaagccgtcagattttatccctgacggcttttttcttccgcacttgtcctgctataaatactgtgagaaaatcatatcaatttattataagaaaaattgcggaggtgctgtgcaaattgagctggcctatcgaaccagacattttattaaagctgggcattgccacgctgatcggcatgatcatcggtcttgaacgcgagctgaaaaacaaaccgctcggactgaaaacctgtatcgtcatcgccgtcagctcctgtatgctgacgatcgtcagcattaatgcggcatatcatttcccaaaatattaccgaatcatgatggatccgctccgccttcccgcccaaatcatttccggcgtcggttttattggcgcgggtgtgatcctgcgtaaaagcaatgacgtcatatccggcctgacgacatcggccatcatctggggcgcagccgggctcggtctggctacaggcgccggcttttataaagaggcgttcgcaagcctcttgtttatcctgatcagcgtcgaatttcttccgtggctgatcagaaaaatcggtcccaaccgcttgaaggaaaaagatatccgcgtgagaatgtctctttccgataaagacaaaatgaccgagattttaaaggaaatgaaaagcaaacagctccgcattcactccgtccggattgatgatctgggcgaaaaagaatttccgattatggaagtgaaagtcagtgttcataaaaaccgctacaccactgacgtctattatgatattaaagaaattcaaggtgtcgtcggagtgaagtgtgatacgctataaaaaaacgccgggctggattcagccggcgtttttctatttatacgaatgcagaaaagttatactccgtaatcggggtttcattttcgatatcgcgcctgaaggttttcagcatctcaagttcctcgtccccgagtgaattgaggtcaaacgcctgatgcaataatccgtagatcagcatatgacgcagccggaggaaatccgggatgtgttcaagccaggcgggatcaaggtcattttcttccctgtagcctttcataaagtgagtcatgaattcacccgtaaacgcggccttgtcttcatacgggatgaccggataccacaacatgttgtacagcagaatactgatatcattcacaaaccaattgtagccgatatcatcaaaatcaaatgcagtgatttttccgttgtcccaattgaaattgccgtggtgcagatcggcgtgcacaaggccgtagttttcagggttcttcggcaaacggcgcagtttttccattagagcatccgcccgctcaaatacgagatgctgatctgcgggcacgtattttctcagcttcagctgctcctcttcatcccattcctgccttttatatgtcggatcgctcagacggtagcttttcgtcagccggtgcatgttccccgtgtactttccaagctcgtaaaacagagttccgttccagtctgattcctccactttgcgtccgggcgctttttcatagactcttactaaaaacgctccgccttttccatccggcacttcttcgacatctttgccatttaatgaaggaatcggctttgctgctgaaagccctccctttgccagatgatgaagccattccatttctccgagaatatattccggtgttcttctgatcgtatgcgtaatttttaaaatataaggttcgttatctttcacaatttcatatacgtagttctctgcgtccgcgataaattgaaacttggtaaagccgtatatttcacctgcttcagcgagcaccttatcttcctcaaaaatcgctttaatatctttatgcatgctgattcacccttttcataacgtttgtaggcggtgtgtgtactcagcaaatgtcattcatcaacattcctgcccttcttttttcacagcagattagtaacatccgcttagaaatgaaatgtgttttcctgttaattcctgattatacaaatatcttaacatacctcattcctcgctccaacgatattcacattaaaaaaacccttgctcatacagaaatgaacaagggcatcttggttaatcgtaaatatggacggtcggttctttgtcacccgcattgcggacgatcagcgcttcctgcccatcagacgaggtaatgttaatttcgacatcaactgagccttttgaataataatccatcagctcacctgttaagtattgggtgaaggcgatgacttcgcttttcccgtaaaattgcatcgggatttcaatcttcatttttctcatttcatcgttttcgtacattgccgttccgacgactccggtgtaattcgggaagtagctgtcgatggcgtttttgaagcgtttaaatacttcggaatcatcagggtatttctttgccgtgtctgtatccgccggatagaagacgtacttttctttgacatcatcccagtttgaaatggtggatgagccggctttgacttctgtttttgcaatgtaattccccggtacgattgatgttttcggcgcttgtttataaagggcgacggtaatcggcacatttttcaggttatccattttccgaaggcggttaacgacttcctgagcgatttcttcaccgtggctgcggatcgttttgtcactgagctccacttcctgctgcggatcacctgtgttttcacggtaatagtatacagagttgagagcgagaccgatcatgataccgccaagctggatggaatttttatcttttcttactaagtaatcctgctcaagcatggacgctaagtaaatcgggctgttttcatttttctcttttgccgatcccgagcttggcagcacgggatttaagccgagattctgaaaattggaatctgcctttttcgcctttttcagatcactgccttcttttttgcggtcaagccagctgagtaccgtgtcctcatctaaatactggccttcctgatacaaatagtcatccgtcgggaacgtgtcttgagcgagccgcatcagacccgtctcgaattcatcgatgtccagcctcgtgttcagccggtccgcagtcaggccgcgcgcttttccggccttaaacggaagcaccattttatagtaggaatcagagatattatatttcggtatgatcgctttttcagaagactttgccgttttctgcgtgatctcttcctctttgttccccccgaaactcggcgaacaggccgacagcatgagtactgccgccgttgccgtcgccgccaatgccaacatctttttcaatagaaaacactcctcttatttctttagctctcccaatagctgtgcttcattccatacttcaatatttaattcctgcgcttttgtcagcttgcttccggccgcttctccggcaatcagcaagtctgtttttttgctgacagatcccgtcagctttccgccgagcgcttcaatctgcgccttggcttcatttctggacagctcttcaagctttccggtcaacacgatggttttgccggcaaaataagagtcgctgtcctccgcttttacttttttcgggcctttgtagagtgtgttcacaccgagttcctcaagttcattcaatagctcaagcatttcttctttgcggaaataggtgataacggcatcggccatcttttcgccgatttcatccaccgcaagcagctcttcttccgtggcttgtttcagattttccaggctttcaaaatgcatggcgagtgttttggccgcttttgagccgataaaacggatgccgagaccgaacagcaggcgttccagcgaattctctttcgacttttggatggagctgatcagattgtcagttgatttttcccccatccgctcaagccggatgacctgctctttcgtcagcttatacaaatcagcgacattacggacgagatgttcacggaaaagctgtgtgatgacacgttctccgagtccgtcaatattcatcgcgttgcgtgagacaaagtgaatcaggccttctctgatctgcgccggacattccggattgatgcagcgcagcgcgacttctccttcaatgcggacaagttcgctttcgcactcagggcagctggtcggcatattgaattctttttcttccccggtccgctgttcgattaagacattgacgacctcagggatgatgtcgcccgcttttttgacgaccactttatcgagaatgcggatatccttctctttaattaaatcttcgttgtgaagggatgctcttgagaccgtcgttcccgcgacttttaccggttccagaacggcggtcggcgtaatgacgcccgttcttccgacattcagttcgatatcgagcagttttgtcacgacctcttccgccgggaatttataagcaatcgcccagcgcgggctttttgccgtatacccgagctcttcctgctggtcgagcgaatcgactttgatgacgattccgtcaatttcatacgggagatcggcccgcttcgcctgcagctcttcgatcatttcaatgacttcatctatcgtggcgcattttttccgttcctggtttgttttaaaaccgagctcatccagaaaatccaggccctgactctgtgtttccacacccatttcgtcaagctccgctatactgtagacgaagatgtcaagatttcgtttcgctgcaattttcggatcgagctgtctgagtgagcccgcagccgcgttccggggattggcgaacggctcctcttcatgtttcagcctttcttcattgagcgcttcaaatgactgtttcggcatgtacgcctctccgcgcacttctatggaaagattccgtttcattttcagcggaatgttgcggatcgtttttaagttttccgtgatatcttcgcccgtcgttccgtctcctcttgtcgcgcctctgacgaaatagccgtcttcataacggagagaaacagcaagaccgtctattttcagctccacattataagcaacgccgtcaccgacagcctgacggacccggcggtcaaaatcgcgcagatcatcatcgttaaatgcgttgccgagactgagcatcggcgtgccgtgctgcaccttttgaaacgattcaagcaccgctcccccgacccgctgtgtgggcgaatcaggcgttctgagttccgggtgctcttcctctatggcaatcagctcctgaatcagtctgtcgtactcggaatccggcacgctcggttcatctaaggtgtaatattcataactgtactgatcgatggtgcggcgcaattcttctgcccggtgtttcgctgtttctttgtccatcatgttcttcctttcctcttcaggttactgcttttcaatcggcgcaaaagcggcaagcagacgcttcacgccgactgggctcgggaatgcgatatcaagctcggtgctttcgccttctccttttacgctgacaaccgttccggtgccccattttttatggcccgctttatcgccgaccgcccagctgagcgagtcgccgcctgttttgttcgcataggaaacgggacgggatacgggcccgcgtttttgctgcacttttcttcccggctgcatgcgaggtgttttcttctcatttaggttctccaataaatcgccaggtatttccctgataaagcgggattccggattcatattggtgcggccgaataaggtgcgcattttggcattcgttaaatacagttcttcttccgccctcgtaatgcctacatatgcgagcctgcgttcttcttccatctcggcttcttccatcagggagcggctgtgcgggaacacgccttcttccatgcccattaagaacacgacaggaaattcaagccccttagcggcgtgcagtgtcattaaagtgacggcatcctttccgcctgattcctcttccttctggtcgagctggtcaatatccgcaatcagcgccaaatcagtcagaaacgcaacgagagacttgtcttcgcttttttgttcgaagtttttcgtcacggaaagaaactcgtcgatattttcaaggcggctttgggcttcgattgatttttcggccttcagcatttctctgtattccgttttctcgagaatttcttccgtgagttccgtaatggacaggtaatcctgcatgttcgtcagattttcaatcatcgcgccaaagccgtcaagcgcgtttgccgctttcgcgctgacgccgatgaaatcaacctgtttgatcgcctggaacattgacattccgttcatcgccgcatatgaagcgattttttctagcgaagtggcgccgacgccccgcttcggcacattgacgatccgcgtaaaactgatgtcgtcgtccgggtttgacacaaggcgcaggtatgcgagaatgtctttaatttctttcctgtcgtagaacttggttccgccgacgatattgtagttcagtccggattttaaaagggtttcctcaatgacgcgcgactgggcgtttgtccggtataaaatcgcgatatcggaaagcttccgccgccccgagctgtgcagctcataaattttccccgcgacgaattggccttcgccgaattcattgtcgccgctgtaataagaaagcttgatgccttcgtcattttccgtccacaggtttttcggcttgcggtttgagttgtttttgatcacttcgttagccgcctgcagaatccgctttgttgagcggtagttttgctcgagcaaaatcacgtttgcgctcggataatctttttcaaaggaaaggatattcgcgatatccgccccgcgccatctgtaaatggactggtcggagtcaccgacgacgcagatattttcaagacgggccgcaagctgcttcacaagcaggtattgtgccctgttcgtatcctgatactcgtctacgtgaatgtactggaatttgcgctgataaaactcaagcacttccggcacacgctcgaaaagcttaatcgtcgtcatgattaaatcatcaaaatcaagcgattggtttttcagcagttttttctgataatcggtatacacgtcactcgtgacctgatcgtagtagccgccggccgattttgcgaattcctcaggttcgatcagctcgttttttgcgctgctgatggaccctaaaatacttctcggatcaaactttttcggatcgatattccgctctttcagaatccctttaataacggaaagctgatcagccgtatcaagaatggagaaatttcggttgatgccgattctgtcaatatccctgcgcagaatccgcacgcacatgctgtggaaagtggaaatccagatttcatccgcgccgggtccgagaatgctctctaccctctccttcatttctctggcggctttatttgtaaatgtaatcgccagaatgttccatggcgccacgtgtttttccgccattaagtatgcgattctgtgcgtcagcacacgtgtttttccgcttcccgcgcccgccatcagaagcagcggaccgtccgtcgtcttgaccgcttcctgctgaacgggatttaatccgcttaataattgattgctaatgtaattcatatccgttcaccgcctatcaaacatatgttctatcataaatcaatttcgtccgcttggctactttgtctttacagccgccaccgttttaagcgcctgatcaaaatcttcatatacggcatttccgacaacgatgacatcggcatgacggccgaaccgttccgccgtttccgcgtctttaatgccgcctccgtaaaacaggacggacttgtccagcacagccttcgttttctccaccgtttctatgtccgccagcatcccgctgtattccagataaaaaatcgggagatgaagcaaatgctccgcgacccgcgcataggcgagaatatcttctgtttctatatgtgtatccgcctccgtcaaagcggccgccttacaatcagggttgacgatgcagtagccctccgtcacgatttcctccactgacatgagctctccgtattctttcatcgcctgatgatgcatgccgacaatccagtccgcctttttgctgttgagcacactcggaatgaaataaagatcaaacccgggcacaatggaatcaatcgtcgacacctcaagtacgcacggcactaaaaaccgccgcacctttgacatcagtctcagcacattgtcctcggtgatattgtcgcttcctccgatcacaatggcgtcagtccctgattcacaaagccgttccagttgttcatccggtaaatctttattcggatcgagtttaaaaacatgcttccactcgttaacatcgtacatgcgttttcgttcctccattcgtttcttgccatttaaacattataacaaattcgtttggcccggaaaaacggaaaaagacgtcattcacctgattcacaaaaaaagattgcgctccgccggacgggaaacggctatgtttgaaaacagacaatatgtggaatgtcaaagagaaaaaagacaaggagtctgatctcaatggaacaagccattatcgtactgatttgtatattgatttttattattttagttcccgccgcattgtttctctggatatacataagagacgaaaagcaggaagaacattcagtgctgcgcaattatcccgcagcgggaaaactgcgctatatatttgaaaaaatcggacctgagctgcggcagtatttattcagcaatgataacgaagaacagccgttttcccggagagaatatgaacagacggtcatgtccggaaagtataagagcagaatgatgggcttcggctcagaacgggatttcgatcagccgggctattatatccgtaacgccctcttcccgaaacaaagggaggagctgcgcgcagatcagacgccgaagatcgacacgatggtatacaagattgacaaagacaacctgctgaaacgcagcgaacaccgcgaaaaagcaaaagcggacccttattacctgcatccggacgatgtgcaagtgatcggccgcgacacatgcaagaagccgttttatgtgaaagggttaatcggacaatcagcgatgagctacggctcacttggcgacagggcaatcaccgccctgtcaaaagggctgcaccaggccggcggcacatggatgaatacaggcgaaggcggcctgtctgagtatcacctgaaaggcggcgcggatattatctgccaaatcggccccgggctgttcggcgtccgcaccgaagatggagaattttcgtgggaagaattcaagaaaaaaagccgcctcgagcagattaaagcctttgaattaaagcttgcacaaggggcgaaagcaagaggcgggcatattgacggttcaaaggtaaccgaagaaattgccgccatcagaaatgtgcagcccggacaatccattgacagcccaaaccgcttcaacgagttctcaaatgttccggacatgcttgatttcattgagaaattaaggactgtcggtgaaaaaccggtcggcatcaaaattgtcccgggcagccgcaaagaccttgaagaccttatttcctgtatgagttcatcaggcaaacttcccgactttattacgattgacggaagtgaagggggaacgggagcttctttccatgagctggcggattccgtcggcctgccgattctgaccggcctcccccttgttgacggccttttgaagacatacgggataagaaataagctgaaaattttcgcatccggaaagctgctcactccggataagattgccgttgccctcgcgttaggcgcggattttgtcaatattgcccggggaatgatgttttcagtcggctgtatccgcgctcaagtatgccacaccaatcattgtcctgtcggagtggcgacaaccgatccaaaacttcagcgcgcgctcagtatcgaggataaacagcaccgcgtctgcaactacgtgctctcgttgcgtgaagggctgtttcacctcgccgcggcggcgggcatcagctcaccgattcatttctcagctgaacacatcgtataccgggaggaagacggaagcctgagggaacttcccggccttttgaatcagcacgcataaaaaaaaccgcctgccgtcatcggcagagcggttttttacgtagctgaggaggattctcctttgtttacgcggtcaagcgccatttcataggcgtcgttaccgtaatttaagcatctcttcacccgggaaatcgtcgctgtggaagcacccgtttcgctttctattttgtgatacgtatttccttcgcggagcattctcgccacttccaaacgctgcgccagcgattggatttcattaatcgtacaaagatcgtcaaagaaacgatagcattcctccagatctttcagcgataaaatagataaaaataactggtccagttcttttccgcgtaatttatcgatttgcatcgtcaaacaccttctcctttactaatggaagctgcatcgagatcaggcacgatattaatccatgtctttcctggcacaaacggaagaatctcaccgccttttacgggcagaatacggccgtctttatattcccagtctgactccataacatcgccgtgctgaagcaggaggcccttcccccctgactgaatatcgatggcccgccttccatctttgtctgtcatgcgatggccggcttcaacaataaaaatgttgtgcatggctaaaggctttccggtctcccggtctgtcgctttcacaccatcagagcttcttgtataagcatcagcttttttatcataatcgtattcgacaagatttgtaatgttttgtgttccataatctatccgaatattgtaggtttcatttcctggttttgcatctgatgtctgaaatgggagcggttctgtttttccgttcagcttgtatcctttttgttccgccgccttcctgatattgtcatacgacgtgtaggaattgtggggcggcttgctgaaatcggctctccaaaacaggcttccgtcaaaatccaaaccgtttatataatcgtaagctccggactccagctgcttttttgcgccgggactccagccatgatggacaaatatgctgttaaacccgctgctgagcgtgacaaaatattccctcgcgctccgcacaggcccgaccgtttccggcatctcactttgaaaaatcgcgagaaaccgcgtaatccggccctccgcgagcgcttcgatgacaacatccgcctttgacagcccggattggggcctcgccttcggatgattgttcactgcgactgcaatcggacggcgttctgcaagcttctgctcagttttcagccccgttaaaggagcttccgcttctttcggctgcacctgatcggcattgttctgccggcaggcggcaagcagcaaaaacgcaaaacaaagcatacaaacggttttccatcttttcatatgtcggctccctgcttttatattttaacgcattatcgatggaaagagtacagtttttttcatcacgtcgaatattcctctcggcgtaatgcggatataaggcaggtgtgtgctctgcaaaaagagcagcgtatagatcggatcgcagaatcggtagccccgctcctccagcagcgtcctcagtttttgctctttctcaagcacttcttcatacttctccgcggatgcagaaccgtttaaggcgaggggaatctcatgaagaatcttcccgttttcggcaagcacgattccgccgccgatttctttcatccgtgagaaagcgagcaggatatcttctttattttttccggcagcgataatatctccggttgtcgtgtaggaactgacaaagccctgcacccgatcggcaaaacctttcagcattgtattgacccgccattttccatgcttatcgagaagcgtgagatagcattcatcatgatcaaaagaaagctggtcaacagaattatcaatcgcaatcatatacggctccataatgaccgcgttgcgcatcgtcacacccatcggcattgaaaactgtaaatcatccatcgtcatatcatatgaaagctcaagagggacgagaccgccctttttccaatccgtttctgtaaacgcattcatatttcggccgtcttctttcagcaggatgcctttggagatcaccgtgaccgggtcaggattcatcgggtcatcgagaatgttcaatgaagcaagccgtcccggaccgaccacaccgagatagtcgtccatctgataatacttcgcgatattaaaggaggccatattgtaggcatcgattgccggaactccttcctccaaagcgattttgattaattcattcgtcatgccgcctttataaaaatgcggcgtcgctccatccgtcgtgtagaagaaatgatcataatgccggaagcctttttgatggagatcctgcaaaatcgttctcaaatcagggcggatggatgaatgtctgagcgaaacatagtagcccaattcaagccgtctcatcacctcgccgccattcatcgcctcgtggtcggaatcagctccgaacagtttcatcttcgtcagtgttttttcagaggctccgggaaaatgcccttctatccgcttgcgcagtttctttgtcgcctgcatgcaatgaagcatcaggtcatcgccgtccatgaggcgcggccatccggtcaattctccgccttgaatgacatccgggtgctcaatccattgctttcgaacatcaaaagaaagaagctgatcctcattcagcacttcagtctgcagatcatatctggaccaccagaaatattgcaccggctgttttttcagttcttccaatatagtaagcgctttctttttaccgctgtgcaaaagaaaaaacaagttatcattaacaaacgtcgttgttccgaattgagacacatattcggcgagcgtttggggattatatatttgaaaaggatgtgtatgcggttcaatgtaacctggcacaatgtattttccttcacaatttatggtatgaatgtgctctgctgcatcaggaagctcatgaccaacatatacaattcgatctccgtaaatccagacattctttttcagccattgttttaaaaaaggatttaatacgagagcatcccgtaaaagtagcgttggaagcagctttgagtctacaacatccgcctgtgatctgatgtctttatttttccagttaaaggtgcgttcggacattcacatactctccttcgcttatattagacccatcgtatcacatccgcacaattatcgcacggctaaaacgttacaaattattgaagatgaatgaaaaactttttctaagggagctgaaatgatgaaaccgaatatcagtttattaaatgccgttatgcgcatcacttgcggcctcaccattttgtctgctgcttcagcgaaatacacgagaaaaccttggtgcaagatgcatctcttctgtatgatgatgggcgcgatgaaagcggcgtccggcatcctccgcttctgtccggcgacatatatgttccaaaccggaatgaatcaggatgacagccatcagcaagaaaaataacaagccgtttcggcttgttatttaatttctcctgtcccgcgagtctaagaagaatccgtctatacgccggaggacttcatcgatgcctgcgtgtcacacggcaagccgacagtcttagtcgtcttttcagaagaaaacccgcatcttatatgacgcggggttttcctctttatcgctgcgatgctttcagcgcacgggcgccgatatcgcttctgtaaaacagtccgggttttgtcagccctgaaacggcgctgtacactttatctctcgccgcttcaaatgtctcagcaaatgccgtgacattggcgacccggccgccgtttgtaacaaattgtccgccgtcttttttcgttccggcatgaaaaacggcgatcccgtcttcagcggacgtcaaactgccgatcggcgtccctttcgcatagccttccggatagccttcagaagccagcacaacgctgactgcggccgtatccttccaccttaggtcaacatccttctcatgcagaagatctaagagcacctgaatgaggtcggattccattctcggcacgacgacctgtgtttccggatctccgaagcgcgcgttgaattcaatgacttttgatccgttttccgtcagaatcagccccgcgtacagcacgcccgtgaaggagcgcccctcttttaccattgcttttgccgccggcttcacaatcgtttcgactgcgcttctgacgatatcatcggaaatgtgcggcactggtgagtaggctcccattccgcccgtattcggccctttgtctccatcgaaggcgcgtttatgatcttgagcgatgaccatcggatagacggtctccccttttacaaacgccattaaagaaaattcttcgccggcgaggaactcttcaatgacaacagatgcgctcgcctccccgaatttctcatcctcaagaaaatcgtgcaggcattcaatcgcttcttcttccgtcatcgcgaccgtgacaccttttccggcggcaagcccgtccgctttaatgacaatcggcgcgcctttttgctgcacatatgctttcgcctcttcaaatgaagtaaacgtctcatactccgccgtcggaatgccgtattttttcattaaatccttggcaaactgtttgctcccttcaatgattgccgctttttcagacggtccgaaaacaagcagtccggctttttcaaactcgtcggctatcccttcaatcagaggaacttcggggccgataatcgtcaggccgacatgatgttctttcgcaaacgcaatgagtgcggcatgatcgctttctttaatgttgaccagcgtcgcgcagtctgccataccgtcatttccgggcgcggtgtacaccgtgtcaacaagcgggctttgcgccgctttccaagccaatgtatgctctctgccgccttttccgataatcaatacattcacgcttcgttccccctcttaatgtttgaaatgtctgataccggtgaataccatggcgatgccgtattcatccgcttttttaatcgaatcttcatcgcggaccgatccgcctggctggataatcgccgtgacaccggcttttgcggcttcttcgactgtatccggcatcgggaaaaacgcgtctgatccgagcgcgctgccttttgctttttctccggcctgctcaatggcgattttagctgaaccgacgcgattcatctgccctgctcccacaccgaccgtcatatggtcttttgcaagaacgatcgcgttggatttcacgtgtttgacgactttccaggccaacttcaaatcttcccattcctgctcgctcggctctctttttgtcgggatgctgatgtcggcgtcatcaaatccatggacgtctaaatcttgaatcaaaaggccgccctgtacggatgtcagctgtttttctttcttccctgatgcggacacgtcaagcgtgagcagacgaaggtttttcttcgccgtcagtacgttcagcgcttcttcactgaaagaaggggcgataatgatttctaaaaagatgccgtgaagggcttcagccgttgcctgatcaacttcacggttcagcgcgatgatgccgccgaaaatggaggttttatcagcttcatacgctttattgaatgcttcctcaattgaagctcccgtaccgactccgcacgggttcatatgtttaacggcaacagctgcgggttctgtaaattcccggacgatttgaacggccgcatccgcgtccttaatattgttgtaagaaagctctttcccgtgaagctgttttgccgccgcgatggaaccggagacgggaagtgcgctttgatagaaaacagcctcttggtgagggttttcaccatagcggagcgattgttttttctcaaatgtaacggtgaattgctcagggtctttctcaccggcctcgcgtgttaagtaatcagcgattaatgcgtcgtatgccgcggtatggcggaatactttggccgcaagctcgcgttttcttttaagcgaaacaccgccgtgttctttaatctcattgagcacggagctgtaatcggccggatctgtgatgaccgtcacatcctgatggtttttcgatgcggcgcgcagcatgccgggaccgccgatatcaatgttttctatcgcttcatcgtatgttacgtcttctttcgaaatcgtttctttaaacgggtaaaggttgacgaccacaaggtcaatgggggcaatgccatgctcattgatctgcgccatatgctcttcattgtctcttacggcaagcagtccgccgtgaatattaggatggagcgtttttaaccgtccgtccataatttcaggaaatccggtcacttctgaaatgccgatgacatccacaccgttttcctgaagaagtttttttgttcctccggtcgaaatgacttcgacgccgagctctgtcagttcctttacgaaaggtacgagatttgttttatcagaaacactgattagtgcgcgtttgattgtcatgccttttcacctctgttatttagtcccagcagctgtttcacaacgctcggataccatttgtgctcaagctcgtgtattgtatgctctatgttttcaagcgtatcgttttcctgtatttcgaatgctttttgcgcgataatcggtccggtgtccatgccttcgtcgacgtaatgaacggtaatgcccgccactttcacaccggcccgatacgcctgtccgacagcgtcaatcccggggaatgccggaagaagcgagggatgtatattaataatgcggcccccgtatgcttcaagcagcgtatctccaatcagtctcatatagccggcgagaacgattaattccgccccgtgcaggcgcagctgttcaataacggcccgttcaaaggccgctttgttttcaaaagatgacggttcaaaggcgaatgacggaatgtgtaaagcctccgccctttccaccgcctttgcctgaggcttatccgtcacgagaagcgagagctccgcatcccacttctcttctctcatgcgtttggcaatggcctcgaagttcgatccgtttcctgaagcaaataccgcaaactttttcatgaaagagccgcaccgccgaaagaaatgccttcgccccgcttgacccggccgatcaaataagccttctcgccctgagcttcaagcgtgtcgataacgtctgtcaagtcctcttctttaacggcaaggacaaaaccgatgcccatattaaagacattgaacatttcttcttctttcagcttgccgtgctcctgcagaaacggaaaaatcggcgggatcggccatgatccgtgatcaatttccgcgctcaatccgtccggcagcatccgcggaatgttctcgatgaatcctccgcctgtcacatgcgccatgccgtccaccttaccgcttttcaccgccttgagcaccggcttcacatatattctcgtcggttccagcaattcttctccgagaggacgcgcaaacggttcatagacagtatccaaatcaagtccgccgtcatcaagaagcacttttctcacaagggaaaacccgttgctgtgaaggccgcttgaagtaagtccgattaagagatgtccctcttcgatatgttcaccggtgacgatttcgtctttttccgcgacgccgactgaaaagcccgcaatatcgtattcatcagccgtatacagccccggcatttccgccgtctcaccgccgataagcgctgatcctgactgctcgcatccgtccgccacgccctgaacgatctgctcaatttttaccggatcggccttgccgaccgctaaataatcaaggaaaaacagcggctccgctccttgggcaagcacatcgtttacacacatcgcgaccgcatcgacgccgatcgtgtcatgcttatccattgaaaatgcgagtttcagcttggtgccgacaccgtctgttccggaaattaaaacaggcttttgatacggaagctctgacagatcaaacattccgccaaaaccgcccaggcttcccataacgccgagccttttcgtgcgctccacgtgttttttcattcgtttgacggcttcatacccggcttcgatgtcaactccggcatttttataagcatcagacatccctatcactccttatcaattcgtttctccttaaaaggcagaaagagaaaggcagcctgaattcccgctgcctttatgtcattttcagattttattttgtcagcaccgcttcttttacgtgaggaagcactgtatcctgataaatttccgtcggatatttgcccgtaaaacaagcgaggcattgtccgcaattggtgtcttcaaattttcggccgactccttttaacaatccgtctacacttaagaaagaaagcgtgtcagcaccgatgatctggcggatttcttccacggaatgagaagaagcgatcagctcctcatgggttgatgtgtcgatgccgtagaagcacggatgagcgatcggcggtgaactaattttcacatgcacctctgtcgcacccgcttctctgagcatcgtgacaatccggcggcttgtcgtcccgcgcacgatggaatcatcaaccatgacgacccgttttccttcgacaacaccgcggacggcggacagcttcattctgacgccttgctcacggagagcctgtgacggctggataaacgttctgccgacataacggtttttaatgagaccgagttcgtacgggatgcccgttgcctcggcatagccgatggccgcagaaatactggaatcaggcacgcctgtgacgacatccgcttcaaccgcggactcctgggcaagcatttttccgaggtttttccgggcgctgtgcacgttaatgccgtcaatattgctgtcaggccttgagaaataaatgtactccatgctgcagatggaacggttgatattcatggagaaacgctctgatttcatgccttcatcattgatgatcagcatttcgcccggctctacctcgcgaaggtatgtcgcgccgaccacatcgaatgcgcatgtttctgatgcgacgacgtaagcatcgcccatcatgccgattgacagcggtctgagtccgttcgggtcaagcgctacgatcatttctgtttcagtcatgattaaaaaggcataagcgcctttcagcatagatagcgaatttttgatctgatccttcagcgaaaagtgtccgctgcgtttaatcaggtgagccagcacttccgtatcggaggaagtctgaaagatgctcccttggttttcaagctgctgcttcaactgtgtggcgttgaccaagttgccgttatgggcgagcgcgaggctgccgttgttttgcgaacggaataggagcggctggacattttcatatccgcctccgcctgccgtcgcataacggacgtgcccgatcgcgccttttcccttcactttgctcagttcgccgttttgaaaaacctcggtaataagcccctgtcctttatgcgccgtcagtttttcaccgtcagttgcgacaattcccgcgccttcctgtcctctgtgctggaggctgtgcaggccgtaatatgtgatctgcggagcttcttcatgtccccagatgccaaacacaccgcattcttcattcaggcctttgatttcagcaagcatggaatagctcctttccacgcgcgctcaagttctttcgtttgcgcgtgaaccaattgttgtccgtcctggttttgaatcgccagaagtccgtcagccgttacctcaccgatatgaaccgcatcggccacagccgcttcaaacgcctcatggtgttcttttttcactgaaacgacgaagcgggattgagattcagagaataataatgccgcttccccttctacagtcacgttggcgccaaggttttccgtcgtcatgacgctttctgcaatcgctacgcctaagccgccttcagacacatcatgcgctgattgaacaaagccttttttaatcgcgtcaagcaatgctttttggcgtgacagctctatatcaagatcgatttgcggcgctttgccgtaaatgcgcccttctgtcattttttgcagttcgcttccggcaaactcaggttttgtttcgccgatcacgtatacaagatcccccgcttgtttgaaatgctgtgtcgtaatatgagcggtatcttcaattaagccgaccatgccgataacaggcgtcgggtagatcgccgttccgttcgattcattataaagtgatacgttaccgccgatgacgggagtgctgagaacattgcacgcctcgctgatgccgtcggccgctttttcgatctgccagaaaatttcaggtttttccgggtttccgaaattcagattatccgtgaccgcaagcggttcggcgcctgagcatacgatgttgcgcgccgcttcggcaacggcgattttcccgccttcttcaggatcaagatataaataacgggcgttgcaatccgtcgtcatcgccagcgcttttttcgtgccgcggattctgagcactcccgcgtcagagcccggagcgaccaccgtatttgtgcgcaccatgtagtcatattgatcgtacacccactctttgctggcaattgtcggctgctgcagcaaggcaaaaagcgtctctgtcccatcttttacttcaggcgcgggaacttctgtttcctgaaactcgcggtagtacgcgggttctgctgacggcttgtggtatacaggcgcttcttccgccagcgcgtcaaccggaagctcgcaaacaacctctccgttatggcggaggcggagcattttatcatccgtaacatgacctacggaaaccgcttcaagatcatatttatcaaaaatatcgacaatttcctgttcacgtccgcgttcaatgacgagaagcatgcgttcctgagactcggaaagcatcatttcgtaagcggtcataccagtttcccgctgcggaatgagatcaaggttcatttcaatgcctgagccggctttgcttgccatttcagcactcgaacttgtcagaccggccgcccccatatcctgaatgccgactaaggcgtcgcattggatgacttctaggcatgcttccaggagaagtttttccatgaaaggatcgccgacctgcaccgcggaacgtttttcttcagatgaatctgacatttcttccgatgcgaaagtagcgccgtgtatgccgtcgcggcccgttttagcgccgacgtacatgaccgtgttgccgacacctttcgcctggccttttttaatatctttatgatcaattaagccgacgcacattgcattgacaagcggatttccctcatagcttgcgtcaaactgcacttctccgccgaccgtcggaattccgatacagtttccgtatcccgcgattcccgccactacttcttcaaacaagtacttcacacgaggtgaagtgagctcaccaaatcgaagagagtttaatacagctatcggacgggcgcccattgagaaaacgtcacggatgatgccgcccactcccgtcgcggcaccttggtatggctcaatcgctgacggatggttatgagattcaattttgaacacgaccgcctgattgtcaccgatgtcaacgattcccgcgccttcaccgggaccctgcagcacgcgttcgccgctagtcgggaatttgcgtaaaaccggttttgagtttttatagctgcagtgctctgaccacatgacggaaaaaatcccgatttccgtgtagttcggcaatcttccgataatagattcaatgagtgcgaactcgtcatcactgacacccatttgctgatagagtttctcttcttttatttgttctttacttggttcaagcagtagcgacatgagtttccctccaatttttcacgatagaccggaacaatgtaagaccgtctgcgctgccgagcagttcatcgactgcgcgctcagggtgaggcatcatgcctaatacgttgcctttctcattcacgacgccggcaatgccgctgacgcttccgttaatatcgccgccgtatgtgaaggcgatttgattgttttcttttaatctttcaagcgtttcgtcatcacagtagaaattgccttcgccgtgggcaaccggaatcgtaatcgattgtcctttttcataggaagatgtgaataacgtaccgccgttctgcacgattaattcaaccggtcggcagatgaactttaaatctttgttgcgtctcatcgcgccgggcagaagtccgagctcctgcagaatctggaatccgttgcagacgccgagaaccggttttccttcggcagccgcttttttcacagccggcatgatgtttgcgaatctggcgatggcgccgcatctcaagtagtcgccgtatgaaaacccgccggggatgagcacgccgtcaaatccgtcaaggcttgtttcctcgtgccagacatactcgacttcttcgccgagttcgtcctttacggcgtggaacatatcaatatcacagttggagccgggtaacacaatcaccgcaaatttcactgtgcgacaacctcctcaacttcatatcggtagtcttcaatgactgtattggcaaggagcttttcacacatttctttcacgagcgcgtcaagatcgcggtcagatttttcaatcgtcagctccatatattttccgatgcgcacatcctgcacttcattgtaggtcatgctgtgcaatgcatgctgcaccgcgcttccttgaggatcgagcacactttcttttaagctgacataaactttcactttatacattatgaaatgcctcccagtcttttgaaaatctcttcatatgcgtcggttaagcttcccaggttccgtctgaacaaatctttatcgagcttttcgtttgtgtctttgtcccacagacggcacgtgtcaggagaaatttcatccgctaaaagaacccgtccctctgcgtctaagccgaattccagcttaaaatctattaatctgacgccgcagtcttcaaaaatatgctgcagctcttgattcacctgttttgtaatcgatttgatcgtttccacctgctcaggagccgccgcttttaaaagccagatatgatcttctgtgatgagcggatcgccgagtgcgtcatctttatagtaaaattcgataatcggctgcggaagctctgttccttccgggatgccgaggcgtttcgacatgcttccggcggcaacgtttctgaccacgacttcaaggggaatgatgctcacttttttgataagctgctctgattctgaaacacgctccacaaagtggttgtcaattcctttggcgtgcagatgtttgaaaatcaggcttgaaatttcattgttcagacggccctttccgctgatctccgcttttttctcaccgttaaaggctgttgcggaatccttgtagaccacgcggagaatctgttcgtcttcagtttgataaatccgtttcgcttttccttcataaagaagattattgttcacaatattcacggaaggcctcctaacccgaatgttgggaatattcaatctatggcggctgaagaagccgcctccggctggcttcttctataaacctaaacgctcaaagatcaagtcgacgtttttcaaatgataattgtagtcaaagcaatcggcaatctgttccggtgtgagacgggacgtgattttttcctccgcttcgacaagctggcggaacggcacttgtttttcccacgcttccatcgctttcggctgaaccgtgtcatatgcttcttcacgaggcagacccgtgtcgattaaagcgagcagcacgcgctgagagtagattaaaccgagtgtgcggtccatgttgcgtttcatattttccgggaataccgttaagtttttgacgatattgctgaatcggttcagcatgtaattcagcgcgattgtcgcgtcaggaagaatgatgcgctcagctgatgaatgagaaatatcacgctcatgccataacggtacattttcgtatgccgtcagcatgtacccgcggatcacgcgcgccatgcccgtcatattttccgacccgatcggattccgtttatgaggcatagccgatgaacctttttgtccttttgcaaaaaactcttccacttcacgagtttcactcttttgcagaccgcggatttccactgcgaatttttcaatgctcgtcgcgatcaaagccagtgccgccatgtaatccgcatgacggtcgcgctgtaatgtctgagtcgaaatcggcgccgctttcaggccgagtttttcacagacatactgttctacgaacggatcaatatttgcatatgtgccgaccgcgccggaaagcttcccgacttcgatcccttcttttgcctgcttgaaacgttcaaggttgcgtttcatttcttcgtgccaaagcgcgagtttcaggccgaatgtcgtcggttccgcgtgtacgccgtgcgtgcggcccatcatgaccgtgtatttatgttctttcgctttttcttttataatgtcaacaaatctctcaatgtccttgagcaagatctcattcgcctgttttaatagataggaaagagcggtatccacgacatctgttgacgtcaggccgtagtgaacccattttctttcttcgcctaatgattctgaaaccgcgcgggtgaatgcaacgacgtcatggcgcgtatcctgctcgatttccaaaatgcggttgatgtcgaaagacgcgttttcgcgcatgactttgacgtcttctttcggaatgacgccaagctcagcccaggcttcacaggctaaaatctcgacttccagccatgcctggtatctgttttcgtccgtccagatcgcggacatttcaggtcttgaataacgttcgatcattatgctcgtcctccgtctcttttcatccatatgttcgtgatgtcctgaatccatgtttcatcaggcttccgtaaaaatgtcatatgccccattttgcggccttttttaatctcatgttttccgtacaggtacagtttggcttcctttaaaagctccatatgctcctccgcaagcttcacttcatcaccgagcagattcaccatcattcccggtttgagaagatcggttctgccgagaggaagtccgcagaccgctctgatgtgctgttcgaattggctcgtttcacaaaggtcgagcgtataatgcccggagttgtgaggacgcggcgccagttcattaatcaaaaggtctccgtcttccgtgacgaacatttccaccgcaagcggcccgacaagttccaatttctccgcgagctgaacggcaagcgcctctgcccgcttttgaaccgtttcctccgctctcgcgggtacgatgctttggaacagaatattatttttgtggatattttcagcagccggaaaggttgaaatctcaccgtgcaccgatctcgtcacgataacggaaagctccatccggaacgatacccagctttcaagtatgcacgtgccgttttctaacagcacagccgcttcatctgtctgtccttcttccttaatgacaaattggcctttgccgtcatatccgccgcggcatgttttcagcaccgccgggagccccagtgcctgaacggcttcctcaagctcccgtccgctgtttacgatccgataaggcgcgacttgacagcctgctgactggatcgcctttttttccgtttccctgttttgggtgatgagcagcagctcgcttccctggggaagatatgcatgttctttgagccagttgagcgcctcgtaatcgatattttcaaattcataggtaatgatgtcactgactccggccaatttttgaatcgcttcacggtcattgtactgggcggtaatctcaatatcggcgatctgtccgcaaggcgagtctttcacgggatcgacgacagcgactttatagcccatttgttttgcggcgacagccatcatttttccgagctgtccgcctccgataatgccgatgacggcgccggggtaaatcgtttttttatcagacaagctgatcactgctttccagcaccgtttgttttgtcgcatttcttctcgcctctagtttatccgcaatgtcatcgtcaaatgccgacaaaatttgcgcggctaacagacccgcgttcactgcgcccgctttcccgatcgccgtcgtcgcgaccggcacgccgccgggcatctgtacgatagacagaagagaatcaagcccgttaagcgattttgtctgaaccggtacgccgatcaccggcagcgtcgttttggccgccgtcattcccggcagatgcgccgctcctccggctccggcaataatgacttttaagcccctgtctctggcgctttctgcatattcaaacatcaaatcaggcgtccggtgcgcggataccacctgtttttcataaggaatgtgaagttcgtcaagtatgtcgcatgcatgtttcattgtctcccaatcggaagtgcttcccatgatgattcctgctagcggctgcattctgttcccaccttctcatgctttgtttttcagaaaaaaaagcccggcttatattgcaactatgaggaagcaatacaaaccgggcatggcgcgcgtatcgtcagtcgttcgcttctgcgatatccatgtcagctgtttatcactttcctgcatagtccggccgtttacggcagccgggtagaaacttatgggccatattcccaagattatatgaggtcgtgttttgatttcatgtttatcttaacaacggacttggataatgtcaacgacattatcgaacgatataaaaattctttcttttaatgttcgtgtttagatcaatttcccttcaaatacgatttttttcccgcaaggaacgacttgaattgatccattttctttcttttctgtaaagatcggctcttccatccgccggacgggcatataaccctcttccttcattaaagtgagaatggtgtcaatcgtttcatcttccgttacttcaaaccgtttcttttttggctttgtcattccttaattctcctcttcttcactgctttcacccagaatccgccgtggatcgttttcggctcaaaggcgatgataaacgctttttcatcaagcgttttaatcgtatcataaagctgaagctcatatttgcgcggcgtcagaatctgcatggcggtccggtctccttcaagtccgcccgcaacccagcttgtaaccccgtatcctttttcccggagctgtttcggcaggtccagatcgagctccttcgtaatgacgttgactgtaatatagccgagcgccagtttttcctcaattttcattcccactataacaccgatgccgtagccgagcgcataggcaatgacgttttgaatttgattcagattgccgagcacaagactcaggccggtcacatacacaaggatttcaatcgtactgatgcctgcggcgaaatagcgctgtccctttaatgtcagaatcatcctgatcgtaaagaaagagacatatataatgttaatgatgagaataatgagaaccatacctatactgttggataaaatcgtctgcatcactgattcccctcctctgatactttgaaaagcatcaatccttcaattaaggatagtttaccctcttttcatcattttcaaaagaaaaaaaagcccgccccgcaaggcagactttcaagctcttatcagtgaagctcggcttttttcaatcgtttgacggcttcatattccttctcaagttcactcagcgtgtacccggacagttcctgaacatggtcttgataaaaccctgagcggatcagttttgtcctcaggtgctgttttttccgattaatggcttctcgcaacaacggggccatcttcatcatccctttccgaatcataaagagtagtgccgctttcgaattgctgttgctctcatcatatctcggccgggtcctcaaaacaacacgctttattagaaaaatttgtaaacattgtgaaagacaaatttcgacttataaagggatcagcgaagcagtaaagtactctgaaataagcggccatgtcacagccgtaaaaatgagcatgatgataaccgccgcggaaatacagtacatcacgtcagccgcaggcttttcagccgatttgtatagaatctgcacaaactgcaccatcgccgaggcggccagaaacaaggtcagcgccgtaaacaccacggtgatgaccggcagattcaataccgcgaaaatcatccacacgatagagctggcgacagccggaaccaaaagcgatccgacccccgcggccgcatcccgcatcgtgattttctgtttcatcatatagcgagatacaagccagaccgcgcccgccgcagcggcaaaaaagacgagcgtatacacgagaacgacggtaaagccgtcaaaaaacgtatgatgccgctccccgtatccgagaggcctttgctggcttgccctcagctgaaaccaatttccgattgagaaaaagatactgaatacaagcattgaaataagagcatatttaaagcgggaaaagccgtcttccccaacgaccttcaccggtgatgtcaaaatgcgcagcgcgaaacggcaataacgtttgaccgcggcccatgcagaagcgagtttttccgtaaaagccggagccgggcgccgttccttttcttttttcttttgcttttgataacgtcccgcatttctggacattctcgacagcggttcttcatcagttccctgatgctgtttttcttcttccaacgtttcttttctttcttccgtcatgtcagcaactcctatcaaaaaaatacggcggaatttgttaaacaagaaaataaaacacttatataaggtaccgaagcgtcctcaaacagtcaagcggttttcttcacccggacacccacatgacgttttatagtatgtattggttttacggaataggacaaaaacaaaaaaccggcttaactcagccggtttttccgttatttcaagaagatgaaatacaggataaagatgacgaacagtccgtacataatcgggtgaacgctttttccttttcctttgcagatcattgtaatcgggtagaatataaaaccgatcgcaatccccgtcgcaatgctgtacgtcagcggcatcataatcatcgttaagaatgccggcacagccacctcgaatttatcccaggcgatcttaccgagcggcgccaccatcagcgcgccgacaataattaaagctggagccgtcacattcgtggtgacaactgacagaagcggcgagaaaaacatcgccagcaaaaagagaatgcccgtcacaacagccgcgaagccggagcgcgcccccgccgcaacgcctgagctggattcaacataagaagtcgttgtagacgtaccgagtacggctccgataacgattgatgttgaatccgccagaagcgctcttcccgcacgcggaagtttgttttccttcatcagcccggcctgtgtcgctacagccaccagcgttccggccgtatcgaaaaacccgacgaacaagaaagttaaaatgacaatcagcatttggacggagaagatatccggaagatgcatccacgcctgtccgaaagtcggcgcaagactcggcacgctgccgacaatgtgcgtcggaaccggaatcagtccgcagaccatgccggcaaccgccgtcagaagcattccgataaatacgccgccgtttacgcgaagcaccatcagaatgaccgtcacaataacaccgaaaaccgtcagcagtacaggaccgctgtgaatattgccgatagacaccaaagtcgatgagtttgcttcaataatgcccgaaccctgcaaaccgacaaatgtgataaacaaaccgatacccgcgccgaccgctaatttcagctcaggcggaatcgcattaatgattttttcccgcaatcccgtcagcgaaagcgccacgaagataattccggaaatcaagacgccggaaagcgcagcctgccatgaaatccccatgccgaggacgacagagaaagcaaaaaacgcatttaatcccatacccggcgcaatcgcgatcggatactttgcaatgagccccattaaaatacagccggccgcagacgccaaggctgtagcggtgaacaccgcgccctgatcaatttttaatgcttccggaaatcctttcacaccgtttaaagacaatgtcagcggattgacgaacagaatgtacgccattgacaaaaaggtcgttaaaccgccgatgatttcattacgatagcttgtccccagctcatcaaactgaaaaaattgcttcaagccaattgcctccttcattctctcccatttattctgcccgttatccgccaaataaaaaacgccccaaatacatttgggacgcttgactacatacgttcagtctgaataaataagaatggattatttatatcaaacgattgagattgatccgtagtcaagccatttacggtagcttggtagaaacttgcgggccatatccccgccattatacgatatctgcatatttgatttctgagtctattgtatcaattcaattttgaaaactcaataaaaaaaacgaacaatcccgttaaaaaaatttggtttattcgttaattgaccaaaaatggaagacggcaaaagccgccttcccgacatcattttccgtcggcaggcccgaccggcaccgcgaatgtgatcttgctgtcacctgctaaaatgttcatggccgtttgattgacgtacaaagcatatgaatcgaatgagaaatcgcgcaacgaatagtctttatcggatgaatcatccaattcaaaaacggattccatttcacccgttttaaggttcgtgactttcgccttattccctttcagataatagccttttttatactcattaagcgatggccaggttttcatttttttcgtattgccgagaccgatagactcaccgatattcatcagctgatcttcatccgccttgcttacatcaattccgctgaattgataatccacaattacccgtctgccttgctgtttgatctttttgacggtaatgccgacatgatgatgtttcgtttcataactgacgggcagttttgttttcagaggcacgatttctccaggctctgattctgtttttatatcgcccgttatgaaaagtgttttcgctttcgggtctatcggtttgctgaattgagtttggccgcgtattcttttcccgccgccgggaagattctttctgccgccaagttcaatattcgacgccgtcatttcataatggtttccggcatcatccgttgcctcgtcaatcgagatggcatcatttttggctgcatcagagaagtcgatagaatacaggagagccgatcccatcgttccgttttccgcccggatatcgaaaaagcggtataatccgtgatttacattcacagctttcgttccttcaagagaaacggacttttgttttttgatcggaagtgtaaagcgccagtttccggggatatccttgatttgtgtaatgacaagcggaagcttatcaccgtctttcagctttgagccgtccgtgaacaggcgaagctgccccgcgtaccgcccgtctttcatttttttcatatcactgctgtcataatcctctgctaacatattccgtggatctttataatcaacttgaaaagagatgctctcctcatctgatttcaaattgtcaacggtaaaattgtaaacgagctgtccgctgtcgtaatacacacttttcactgtcaccgtaatcccgcgtgattccgctttctcattcagttttgtcaccaaattgcttttaaacagcgcagaacctgccttatcctgaaacagactgtaaatttgtccggcaacaggaatgtttcccatagccgtgttaacggagggcatgaataagcctgaggacaaatacagaataaacaaagcagcagcaaccgcgagtccgtttatcacttttcgtccccatctccgtctgacggcgccttcttttccggcacggacaacagcgctggatatcacgtttttcaactcagctttcggcacgtcaatgtcctgatacaattgcttcatttgatgcttttccatatatgttcctccttttccagctcctgcttcaatgcttttctcgccctgtggagatgcgtttttacagtgccttccgccataccggtctgttcagcgatcatagcaatcgagaaatcttgaaaataataaagctgaatggtcagctgtatatgttcgtcaagcgtttccagggcattccgaagatctatgtattcttcaatgttcttattctccgcgcgtgtatcatgttgcggctcaaacgggatgacgtctccgtgctttttcctcatcgcaaaaatcgtatgaagcaaaatccggatcagccacgttttaaaatatttcggctccttcagctgcgcgatatgaagaaaagccttgtaagccgtttcctgaacagcgtccagtgtatcttccttgtgatgcaaatagagataagctgttttatataaagtctcctgatgagctgtgatcagtttttcaaaggctgcggcatcaccttttttcgcctttttgatcaatcgttcttccttcaccttatccacctcctatgctgttagatatgaatcagggcaaagcggtttcaaaaagatgaaaaaaaacgcctcttttttaaaagagacgtttttttatcttcatttattcccactcaatgctttctaaacattataagaattaatttattgaatatcaagccttttggggtttgtagttccttgatttagaagttaccattaaaaatattgctcccccgtgttctgaatattatgggagggggtaaatactgtgatttagtgttttagttgaccttataataaaaaaagcgcactaaatcgaattgaaaggtgcaaaaacatgattacaaatcaacaattagtcataaacaatttggaagaaaaattaaaatcatttacccatacagttagcggagagcttacaaaggaagaagatttcatcatagcaaatacaaaaatccccactgatacattcaatgtaatattaccgaaatctccaaatatcaaaaatacagttaagatcagacatggaatcgataatttttcatataaaaaatatccctttagtatatggattgatgctcagtatttaactgaggattggacaaaacttatacaagaatatgatctaaaagaagcggaacgtaatgtaatgatgaaacttgaaaatactcttaatgttgggcaaagaatttcccatcagcttatgattactgctgtgaaaaatgatgaagaacttttaaaatatatagacatattcacgagcttatttgagggtacaccagaaaaagatgcactagaaagttattttaatacgttttcacaagtaaaattaggttcagaagttcagatgtttattggatgcatagatgaaatgcctgtaactaccggtttattaatagaaaccaaagatagctatggtatttatgatgtgatgacaaaagaaacatttagaggtaaaggaattggcagtgaaatgtttcaatttcttctaaatcaaacaaaggataaacaaaaaccagttgtattacaggcttcagaggatggaaaaaatatctataagcgatttggatttatagatgtcggagaaatggttgtatttgaatagagggtttctttaatttgcttaatttgaacaaactttattctaaaacaacattaattattatcccattgtggaatactttttctttaaaattcacgattcaattaataatattggatcaattgttgctataaaagaaaaaagagcttagaacccttataaaccaaggattctaagcttcttttgactattcccactcaatcgttgcaggcggcttgctcgtaatgtcatacacgacgcggttgatgtgtttcacttcgttgacgatccgtgtcgaaatcacttcaagcacatcccaagggatacgcgcccagtcagatgtcatgccgtcaattgatgttacggcacggataccgattgtgtaatcatacgttctcgcatctcccatgacgccgacgctgcggatgtcaggaagaaccgtgaagtactgccagatgtcgcgctcaaggccgtgattcgccacttcttcacgcagaatcgcgtctgattcacgaacgatttcaagtttttcttccgttacttcgccgagtacgcggatgccaagtccagggcccgggaacggctgacgccatacgatatcatccggaaggccgagctctgtgccaagcgcgcgcacttcgtctttgaaaagggtgttcagcggctcgatcagttcaaactgcatatcttcaggaagtccgccgacattgtgatgcgatttgatcgtttgcgccgttgcagtaccgctctcgataatatccgtgtaaagcgttccttgcgctagataatcgatgcctttaagcttgtccgcttcatcatcaaatacgtaaatgaattcgttgccgatgattttgcgtttttgctcaggatcagaaacacctttcagcttgtttaagaatctgtctttcgcatcaactttaatgacattcatattaaagccttcgctgaacgttttcatgacgccttccgcttcgcctttacgaagcaggccgtgatcgacgaaaatacaagtcagctggtcgccgatcgctttatgaattaaagcagccacaacagaggaatcaacaccgccgcttagcgcgcaaagaacctgcttgtctccgactgtttcacggattttttgcatttcgatttcgataaagttttccattgaccatttgccttcacaatcgcaaacgccgaatacaaagtttttcagaagatcattgccgtattcagagtggcgcacttccgggtggaactgaacgccgtaccaattcttgtccgctttgctcatcgctgaattcggacagtgatggcttgttgcgtcaacagtgaagccttctggaacttctacaaccaaatcgccgtggctcatccagacaacttgttcttccggaagatctttgaacaagtcaggagttccttgaatctgaatgttggcttttccgtattcgcgctggcttgccgcctcgacttttcctccgagataatgagtcatcagctgcatgccgtagcagatgcctaatacaggaatatctagttcaaagattttttcgtcacagcggaaagatccttcatcatatacactgttcggtccgcctgaaaggataattccttttggattcatttctttgatttcctcagctgtcaacgtatgggggtgcagctcgctatatacgccaaattcacggatccggcgggtaatcagctggttatactgactgccgaaatcaagaacaagaatcatttcattcactaacttcgtcatggttgtcacctaatctcctctaagtttttgacacagaaaaaacggaggacaaacgttcagccctctgtcgcgcaagacttgtccggaagcccggctttttaacgctcccgggctcccatttaacattcatttattctaacaacaggacgatatgcggtcaagactatcttgttttaattatattttcccacaactgtcccgattcattccaaagctccgctgcattatccctgcggtataaggcccgctcatagagcagcgtcagctcggacatgtcgtttgtatggtacgcctcgtcaatcctcgcggcaaaatcgcgcagtgtttctccgtctcccctgctgaatccttttcgtttcagctggcggagcagcgcggcatatgcgtcgaaaaagacgtcttcatccgtacgccgcttcaatctggctgctgtaacgtgcggaatccagcgcgcccggagcacccaggcgagtgccgccgcggctgaaatcacgatgacgatggctgcatacggccatagctgtgccgcggttttgttgtggatcacaggctgcggtgccgcgctgtgatcccgctttttcggcttttcctctttttccggctttgtttcctgacgctgcttgtcagacggttcatccgaatttcccgctgagcctccgctgtcttttgccgccgtatgattttgctctgacgtaaactccgtcggattggtgaagccttttgtcggctcaaacgtcacccagccctgatcgggaaaatacacttctacccacgaatgggcgttgttgtttgtgacttcataaatgtggccgttatggtcgcctgcccctttatattcgccggatgtatagcccttcacccaacgggcggggattcccgcagagcggagcagcacggccattgccgatgaaaagttatcacaatatcctcttttcgtttcaaacagaaattgatcgacataatcctgattgtgctccggaaccgcgacatcctgtgtattatacgaaaatgcggaagatccgagataatcctcgatcgccttcgctttatcgaacatattatggtgatcccgcgtcagtctgtccgcaagctgtctcactcttttcggaaggctgtcggggacctgtaaataccggtcattgaattgattctgctcacggtatcgtttcactttcacttttctgagatcattcagcttaaagacgggcgcctgaaaagtcaccgtgtaccgtcccatattgcggatgttgcccacttgttcactgaccggcgtaatttgctcggtgtttccgttcatttcaagctgaatcgagtgcttcggtttaatattggagacgccgatcggatacatgacgtgattatagagataattttcatcaatggacacctgtgccgtataccgtctcgtctgcacactccggtcaaaccatatatcttccacgttgccgccgttcagtttataggacatgccctgatcggtctccacccagcctttccccgtgtatgtatccttcgtttccacccggaagtacgcccgttcttttcccttccatgtgaaaaccggcgtatcatcctgctgaaaagggccgcccaatgtttcatcatgattgccgtagccgattttgctttcggcggcgggcacttctttgtggtttgttatttttttaagaaacggcacggggtccggccagttcgggtctgatttcggagccgccagaccgaacacgacggaagcgcagataaacagcatcagcggcagaaaccatttgagtatcaatctttttttaaacgctatgtgttccgtaagccggatgcgctccatatacaaaagccccatcatcaaaaagccgataaagacgatccggatgacggcgtacgcggcatcataaggagtaaacgtatcaagcacggtgatatacgccaccgtcatgataaaaaagaataatattttccgctgatagatcacccagtaatgcagcaaatacacgagcagccataaaagcacaaaaaacagcaatgtgcggaatgacggattcatatcattccatcttccggacccgatgtggcgggcattttgcatcacgtcccgcaaaaaagaaacgagccattccggctgaaaaaccgaacctttataaaacaagatatgaatactgatcaacgtaaacagaatgcaggacggcacggtgacgtaccacctcatccggaagaatgacagcagaaatgccaaaccgataaaaacgatgaaaaaaccggtatgttttgtatctgtaaaattgtgcagcggcctgagccattcccataacaataaaaaagcgagaaaataaaacagcagcagactcagcctgcttccctggttctcgtcatgcggcatggcgcgccacctctctttctaaacaacatgggacacccgtttgtccctgatcatttgcaccttaatatttttttgagcgaagatgagagcgagtttccgttctttctccgaaagcgcggcattcgtttctttcgccaaaaacaccgtcatgtcagcacggccgggctcagcctgtttgagaaggtcttctgtaagactgcccgtcacgacggcaatggaagctttgcggacgcgcggatccgccagctcttttcctaaacgcccgcctgcatcggcttcttccgattctgaagctgatgccaggtaacgcagcatctttctgaaatgccggtctccctcccggacgggaaatacggtccggtcgctccccaatgaaataaatcctgcgggagagcccttcacaagcgccgtgtaaagcagggatgccgaagctgataccgcggcttcaaacgatggggacggcctgcagtccaaaaggagagtcatattcacactctgcagcgggtcaaattccttcgtcatcagctcatttcgccgcgctgatgttttccagtcaagtgcggaaaaccggtcgcccggctgataatttctgacgctcgcagccattgcggagcggtgtacctgaaacggagcgccggcagccgcaccctcttctccggatgcggcctgcggcttatagtgaacagacccgtacgccgggaaaaccagaaccgtatccgtaacggaaaacgacgccgtcttgtccaaaagcccgagaacatctcccgtccgcactcttatcgtatgtaaatgatgctctccgcgcggcacctgtggcagctcatattgtaacgtcagcttcctttgaaaccacggaaacacgagctgtttcgcactgcgcctctcgccaagcgtttccggcatcacatcttcaatgaccatatatgtcagcggaaacggcaggcgcctcgtcagcctgatggtgacagacagcctgtcgcctgaggttaactgggcggaggacacgtcacgcgtcacctgaaacgcccgcagcgggtacacagcgaccagcccggcgtaaacggtaaacggcaaaaacgcataaaataaaaaccagctcacaaatccgccctgaaacatggcataagaaaagacagccgccgtcagtaaggccaacataagcagcttccagccatatagaagccaatgcatcttctttctcattagcggaccgacatcctttgaacgggcactttttccgtttgcatgatgtcttctataaccgcttccggggtcacatcgttaaatttcgcctcggcggtcaagatcattctgtgcggcagcgtatacggagccaaatactggacgtcatcaggaatgacgtaatcgcggtcatgaagcagcgcgtacgcctgcgcggctttcattaatgagattgaaccgcgcggacttacgcccagatgtacggacggatgccggcgggtatgctgagtaatgccgacgatatacgctttaattccatcatccacccgcacctgctccaatttttgctgaagactgataaactgttctttagaaatgacgggctcgattgtttcaagcggattgcgcccttcctgcaaagacagaacttgaagctcttcctcggcagtcggatagcccatgcgcagcttaaataaaaaccggtcaagctgggcttcgggaagcggatacgttccttcatattcaaccgggttttgggtggccatgacgaaaaacggctcagccagccgcattgtctttccgtcaatcgtaacattcccttcctccattgcctcaagcagggaagactgcgttttcggagaggttctgttaatttcatcagccagcacgatattccccatgatcggtccagggcggtattcaaattccatcgttttcgtattataaatagagacacccgtcacatctgacggcagaagatccggcgtgaactgaatcctcttaaagtcagctccgatcagcttggccaaagcgcggaccatcatcgtttttccgactcccggcacgtcttccagcagcacatgcccttttgcgagaatggcggccagactgagtatggcgatatcccgttttcctatgatgatgttttcaatatgctcaacggctttctccagcagcggatgcagctcttctttataagccattcttctcctcctagtcatctctcaaatttcaattatcgtaacctaactttaccacaaaatataaacagtataaaaaaacgtttccagcgaattgtttccagtctgaaaaaggaaaaagctccctttagaaaggaagctttatttcagctggagaggctccatatgaatgtgtgaatggtcaatggcatgttcatctttcatcttgcgttctacctcatttgcgatctcatgactctctctaatgttcagatctgacggcacttcaatgacgacatcaatatgaacggagctgcccagatatctcgctttaatatcttttaaacggctgacgcccgcaatctgttcaatcgtctttttataatcagaaatatgtttgacatcaaaaccgtcagtcagcgaatgagaggattccttaaaaatatcccacgcggttttgcagatgatcaacccgatgataaacgcggtaaccgtatccacccaagccaaatggaactgtgaagcaaaaattccgataaacgtgccgatactgacgagcgcatctgatttattatcagcggccgcagctgaaagggcctggctgtttacctttttggcaagccctttcgtatagcggcagaccatcagcatcacgacggcgctccccgcggccgtccaggcggctatcatatccggtgtttcctctttaacggaaaaaatagattgtgcggcgctgaacagcacttgcattccgacaagcatcataataatggaagcgatgagtgacgcgacggtctcggcccgaaaatggccgtaaggatgatcttcgtcaggaggtttctgagagatgcgcaaaccgatgaaaacagccgcagatgccgcgatatcagtcgcattatttaaaccgtcggcctgaagcgcttctgagtgaaacaaataaccgatcacaagcttcacagccgacaatgccgcatatgcgccaatactgacaatcgctccggtttcgccttttttcaattcatgatatctctccactgaaaatcctccttcccgttcaatttttccttcattatcatacaaagcgaggacacagtgggtctatagaaacatgattcactttccacagaaaaatagtaagcatagaacatttatgcgctcaggaaacttatttttattcacgaaaaacctctcatcccaatcgtatcaaggattctcgccaacccatgttcatggaattattttcaaacccattaaaacacaaaaataacagaaaattatttcttttccttccggcaccttctgctgtacggacgagaaaaaatgtcatattttcttacatcattttcaactgtctgtggcatttatgatagaataatacttgtcggaatattcagcataaacaagccaaaaggaggcaaagaatgaatcagcctaactctttatcaaagggattaaaaacccggcatatgactatgatttcaattgccggcgtgatcggcgccggattatttgtcggaagcggatccgtcattcattccaccggacccggagcgattgtctcctacgcattagcaggactattagtgatttttattatgagaatgctgggggaaatgtcctccgtcaacccgacaagcggttcgttttcacagtacgcgcatgacgccatcggtccttgggccggttttacgatcggatggctgtattggtttttctgggtcatcgtcattgccattgaagccattgcaggcgccggaatcatacagtactggttcccgggcattccgttatggctgacgagtctgcttctgaccgtgctgttaacactgacgaatatttattcagttaaatcgttcggcgaatttgaatactggctttccttagtgaaggtagcgacgatcgttgtcttcttaatcgcgggatttgcgttcattttcggaatcgtccccggcagcaaaccggtcgggctggaaaatctggcgggcagcggcggatttttccctaaaggtccaagttccgttctgctcggcatcgtcgttgtcattttttctttcatgggatctgaaatcgtcgcaatcgcagcgggagaaacgtcaaatccggtcgaatccgtcacgaaggcgacccgctcagtcgtttggcggatcattattttttacgtcggctccattgcggttgtggtcacactgctgccgtgggattcagccaatattttggaaagccccttcgttgccgttttgagccatatcggggttcccgcagccgctcaaatcatgaattttatcgtcctgacagccgttctgtcctgcctgaactccgggctttatacgacgtcacggatgctgtattcactggcagagcgaaatgaagcgccgcggcgttttatgaaactgagtaaaagaggcgtaccggttcaagccattatcgccggcacctttttctcctatattgccgttgttatgaactacttttctcccgactccgtatttttgttcctggtcaattcatcaggggcgatcgcactgctcgtctatctcgtcatcgccgtctcgcatctgagaatgagaaagaaaatcgaacggacaaaccctgaatctcttaaaatcaaaatgtggttttatccgtacttaacctacctgacgatcatcgccatttgcgccatcttgttatctatgctgtttatcagttcaatgcggtctgaatttctgctgacaggatttattactctgctggtacttgcctcatatgtattccgcaaaaaacaaaaaccgaaagagagcgcttccgaaagccggattgcgcaataaccgcaaacacccccctcaaaaaagggcgggtgtttttttaaccaacctgttccaggcagcattaactgtagtacaggatttcaataaatgataaggacaggatgaaaaatggcactagaaaaatttgcagatgaactgccgattatcgaaacactccagccgcagaagaaatcagacggcagcacgtattatgaagtcaccatgaaggaatgctttcacaagctgcaccgcgatctcccgccgacccggctgtgggggtataacggtttatttcccggcccgacgatcgacgtgaaccaagatgagaacgtctatattaaatggatgaatgaccttccggataagcattttctgccagtggatcataccattcaccattcagaaagcggccatcaggaacccgatgtcaaaaccgtcgtccatttacacggaggagcaacgccgccggacagcgacggctacccggaagcatggttcacaaaggattttaaggaaacgggtccttattttgagagagaggtataccattatccaaacaaacagcgcggggctctgttatggtatcacgatcacgccatggcgattacgaggctcaatgtgtacgccgggcttgccgggatgtatatcattcgcgagcgaaaagaaaagcagctgaagcttccctccggagagtatgacgtaccgcttatgattttggaccgcacattaaatgacgacggttccttgtcttatccgagcggacctgctaacccttccgaaacgctgcccgacccttccatcgtcccgtttttttgcggaaataccattctcgtcaatggtaaagcgtggccgtatatggaagttgaacctcggacatatcgtttccgcatccttaatgcctccaatacgagaacattttctctctcgctcaataacggcgggaagtttatccaaatcggttctgacggcggactgcttccccgctctgtcaaaacacaatctatcagcttagccccggcagagcggtatgatgtgctcatcgatttctccgcctttgacggagaacatatcattttaacgaacggcaccggctgcgggggcgacgccgatccggatacagacgccaatgtgatgcaattccgcgtcacaaaaccgctgaagggagcagacacaagccggaagcctaaatatctttcaacaatgcctaatgtgacatcaaagagaatacacaatatcaggacgcttaaactcacaaatacgcaagacaaatacggccggcccgttttgacgctgaataacaagcgatggcatgatcctgtgacagaagcgccgaagctcggcacaacggaaatctggtcgattatcaatccgatggggggaacacatccgatacacctgcaccttgtttccttccaaatccttgaccggcgcccttttgacttagagcgttataacaaattcggcgacattgtgtatacaggccccgccgtcccgcctcctccaagtgagaaaggctggaaagataccgtgcaggcgcactcgggagaggtcatcagaatcgcggcgaccttcgctccttacagcggacgctacgtatggcactgtcatattttagaacatgaagattacgacatgatgagaccgatggacgtcacggataagcagtaaacaaatatcaccccttttagagaaggggattttttatttatccaaaaagaaaaaataagaagacacttatttgcatatactgtaataacaggaagacgatgcaccctcattggaaatctggataaaaaaaggaattaggagattagggaaaagtatgagacaatgaaggagtgcacgaaaattcataagggaagaagtgactttatgtcttactacaacaaacgtaatcaggaaccgctgcctaaagaagatgtcagtacgtgggaatgcacaaaagaggactgtatcggctggagcagaaagaattttgccggcagtgataccccgacttgccccctttgcggcagtaaaatgatcgacggcgtccgttcgttggtaaatctccaaaacaataatcaaacggcatcaagttagacctcccttttacgagtctcaacatagagaaggcctccatgtctcatgagaggcctttgcgttatcatttccttttatgatgcaaaggagcaatgaacatgaaaaacgatcggcagcagaaagatctgaaggaaatggcaaaacggcggaaaatgaaccttgccgcacagtcattcatcgaaacgcttcattttgccgttccgattctccgttttttcaaatggctcgcctcagccgcagccagctttgttcattaaaaaacacccagcgggcgctgagtgtttttttcatgattggatgacggaaaaactgttgataatgccgttgtcattttcccagactttttcgcattttttcgtatccaaatgataagcataaatggtccggaccttcgcattccgccccgtttcatccttcagacgcttagcgccttttgcttccgccatgaaataaatgatgctgccgtctttagaaaactgaggctgggcatcaatcagcggagcgaagtccttcccgtttgagataatcgtttcatcttttttcgttttgacattcatcagacggatggacgctttttgttccgtccctttttgggtataagatgtaaagacaaagttctttccgtccggtgacaccgccacgtcgctgataaactgttcaaggtttgtcagatcctgaaggtgttcgcccgctcctgctgcaaaccggatattcgtcggttcagggtcaatccccttctcatttgcctcatccgttttttgataatcctcttttacagaataatgcagaagcgcaaaatcgttttggctgcggttataaaagaagctgctcacactgtcgtctttctcatcggcggcgggatacagattttcataacgtttcgttttcaaatcaaaagatgcgagacggaaaatatcttcatccgcttttccgagacggaaataaatgtgcgtcagatcctttgataaaaacagactgtcagcgcttgccgttcctttataaagcaccgtcttctgtttcgtcttcagatcaagcttatagagacgcatctcattttggtcattattcccgacaaaatagagcacctgatgggcgtcatccagcgcaaacgccggatatgccgaaagcttttcctcgtacagcacgcggccgtcctcgtaatatttcgtcatcagatctttgtctgtaatggaaacaagcagcttgtcatggccgccggagacaacggctttcccgccgccgtcgctttttcctttaatcagtaaaacggacgcgatgaccgccgccgccaaaacggcagccagcaacatccagatccatcgtttcttcttcattatcaatctctccgtcaatcagaaaaagcaagaatcagtgtccttgctttttaagatggtctattttaatagctgtagtgtccggatactcttcctttgcttaatggatatccgagcgctttgaacgctttcgggctgacatccaatacggcattcggcagacggcctacatcatttttgtatacggtgataacctttttcggttttgctttcgcataagctctgattttcgttccgtttctcggaacgtcaaatcctaattttgtcgcacaatcccagtgtcccagttttttaccggaagatccttttttaccgactccattataccatgtaatatttccgttcacttttttagcacttgcatcagaagagtaactgatcgctcccagcgtgcttcctgctaaaatcaataaggctaagaataacttcttcaagctttcgtcctcctgattctttattctaggcaaaattatacaccaagaagacgattataatatttcaatcactttacatgttcattacaacgtgatgagacatgcacataacgacggcacaatttcccgttctatataattccatggtaaattatactacaaaatttaattcattagcgttataatattcatagagtatttctgcattcaatatggactttttataaggcctattgatagttgcataatatgatatattttgagaaatcaggctttaggaagcaggcactttattccttttaaccgtggttcatattgatcatgtacctatactcgtttcaatcagactaggagtgataatcaatgaaagcggcaagatggcacaatcaaaaagacattcgaatcgaaaacattgatgaacctaaagcagaaccgggtaaagtcaaaattaaagtcaaatggtgcgggatttgcggaagcgaccttcatgaatatttgggaggcccgatctttattccggtcggcaaacctcatccgttaacaaacgaaatggcgcccgtcacgatgggtcacgaattctcaggagaagtcgttgaagtgggcgaaggcgtcaaaaattacagcgtcggcgaccgtgtcgtcgtggaaccgatttttgccacacacggacatcagggagcctataaccttgatgaacaaatgggattcttaggcttagctggaggcggcggcggattttctgaatatgtatccgttgacgaagaattgctgtttaagcttcctgaagagctttcttacgaacagggcgcgcttgttgagccgtcagcggtagcgctttacgccgtccgccaaagcaaattaaaagcgggcgacaaggcggcggtttttggctgcggaccgatcgggctgcttgtgattgaagccctgaaagcggccggcgccacagatatttacgcggttgaactttcaccggaacgtcaggaaaaagcgaaagaactcggcgctatcatcattgatccgtcaaaaacggacgatgtcgttgaagaaatcgctaaacgcacaaacggcggcgttgatgtttcttatgaagtaacaggcgttcctgtcgttctccgccaggcgatccagtcaacaaacattgccggtgaaacggttatcgtcagcatctgggaaaaaggagcggaaattcatccgaacgatatcgtcatcaaagaacggaccgtaaaaggcattatcggataccgcgacatcttcccttccgttcttgcattgatgaaagagggctacttctcagcagataagctcgtcacgaaaaaaatcgtgctcgacgatctgattgaagaaggcttcggcgctttaatcaaagagaaaaaccaagtgaaaatcttagtcaaaccgaactaaaccgttcagctgaatatcagacacatccgaaaaagagccgttccggctctttttttcatctcatcgtctttccttccttttccttttaaaaatgatcccctctgcgcaaactattttttaccctgtcccgtctatccttaggcaacagcctatgatacgtattttaaaaaaaggagccctttgaagcaatgaagaacgaaacagccaaagcgtcgcttgtgacgtgcataactgagcgcaaggaagacttttaccggctggcgtacagttacgtaaagaacaaggatgacgcgttagatattgttcaagaatcaattcaaaaagcgctgacatcggtcgaatccgtcaaaaaccccgatgtgatcaaaagctggttttataaaattttagtgcgcacggccattgattttctccgcaaacagaaaaaactgaaagtgatggatgatgaaacgatcgagtttttaagccgaggaaaggaagatcactacaaggacacagaccttcacgaagcgcttgatgacctgccgcatcaatataaaaccattatcattctgcgtttctttgaagacctgaaattagaagaaatcgcggacatcacgggggaaaacatcaacaccgtcaaaacacgcctttacagggggctgaagctcatgcgcattcagctgacgaaggaggatctttcttaatggaaaagagattagaacaattaagagaagagtataaaagtgtgcccattcctaaggaactggacagcattgtcgaaaaagcccttcagcagaaaccgaagaaaaaacgaatcgtgatgtggccgacatccgcggcagtcgctgcggccgtcttatttaccgccgttgtcaatatcaacccggatgccgcacaagccatgtctaaaatccccgtcatcggcaaagtcgtccaagccatcacattcacggagatgaaggaagaaaagaaccaatcaagcattgatgtgaaaacgcccgctctgtccggcctttccgatcataaactcgaagacagcatcaaccggcattatatgaaagaaagcaaagagctgtatcaggaatttatgaaggcgacctcaaaaagcaaaaaaggccacctcagtatttacagcgattatgaaaccgttactgacacagcggatttgatctcaatccgccgtgatatcgaaaaaacgcaagcttcctcttatacgcaaagccgttacatcacgattgataaaaagaatgaggccgtgcttacgttaaagagcttatttaaagatgaccgttatattaaagtcatcagcgaaaatattaaagaacaaatgaaaaaacagatgaaagaagatccgaataaaatatactgggtcgaagataatgatatgtcggagccttttaaagccatccgcgccgaccagaatttttatattacagataagcacaaacttgtcatctcatttgatgaatacgaagcggcacccggatatatgggcgttacagagtttacaataccgacctccgtcatctccaagctgcttgtcggagaccgctacatcagataaagaaagaaaaaaatccatgatatccgcagatcatggattttttctttcgtcccgcaacagccaagatgcacaagggacccttttcatatatcagacgccggacgggggctgaaaagtttaagaaaatcacagcatttcattcattttttctgaaacaaaatccccttccgaatgcgtctaattaacggaacaaatggaagactgtacagaaatctgccatagccatccgcaaaacagcgagaatttccgcacacattattggaggaataccatgtcagacaagtcactgcatcaccgctatattcccggactggatggacttcgcgcctttgccgtcctcgcagttatcgcatatcatctgaattttaactgggccgacggcggtttcattggtgttgatatcttttttgttttatcggggtatttaattacatctattatattgcctgcccaaggcaatgccatcacccttgatttgcgtgatttttgggtgcgccggatcaggcggcttctgccggcggcttatctcatgattatcacgacggtcatttgggtcgtattgtttaacagcgagctcctgcataccgtacgcggggatgcggtctcctcacttttttacataagcaattggtggtttatctttcatcagctttcttatttcgacagcttcggctccccttcgccattaaaaaacctttggtcgctggcgattgaagaacagttttatatcatatggcccttcctgctgcttgcgggaatgtacatatgtaaaacacgggcccggcttgcggccgcggtcatgttcctcgcgttatgttcggcagtcgtaatgagtatgatgtatgtgcccggcggagatccgagccgcgtttattacgggacggatacccgctcatttgaattgctgatcggctgcgctttagctttagtgtggccgatgaaacgattatcttccaaacggctgccgagcagcatgaaacacctgcttcacgggacggagcttgccgcttttgccgcgctgctgctttgcgtcttttacacggatgaatatgaacccttcctgtacaagggcggcatgcttttgatcagcatcaccgcagcggttcttgtcgcatgtttatgccatccgagcagctttttgggacatgttctttcatggaagccgcttcgctggatcggaacgagatcatacggaatctatctttggcattacccggttttcgtactgagcacacccgtgcaggaaatcggaaatccggtttattggcactgcgccgtcagaatcggcgccactttcattcttgccgagctgtcttaccatttcattgaacagccgatccgcactgcgggcttccggccatttttacgccgcgtgtttctgaaccgctttttggaatggaagacgtcctctgtcatcagcagaatgtcgctcggcctcattcttgccgccattctcgtatttgcgggcgggctgtcaggaatagccgaagagaaaaaacagccgcaatggacgtacgcgcaaaatgatcagcaagaaaccgccgcctcttcgcacaagacggccgatcacgatcaaccggcaaaagaagatgacagcaagaaaaaacacggcggcgaaaaaacggataccgcgtcagacaaaaacaagaaagaaccaacagacaaatcaaatacaaagaaaaacgaagagaaaaaggaacagtcatctcaaaaaacggctgatccaaaacaaacacagcctcagcaagacgtgctggccatcggtgactcggtgatgctggacattgcgtcatacctgcggcagtccctccctcatgtcaccatcgacggaaaggtaggaagacaagtctctcaagcactccagctcacttcggaatatgcgtcatttaatcagccggacaaagcggtcatcatcgagttagggacgaacggctatttcacaaacagccaaattgaatcactgatcagctccttttcaaaagccgatatctatcttgtcaacacacgtgtgccgcggcagtgggaaagcaaagtaaacgaatcattgcgccggcaggccgagtcacggaaaaatgtgacgcttgtcgattggcacgcaaaagcattgcagcaccctgaatacttcacaccggacggcgtccatctcatacctgaggggtctaaagcgctgacatccctcatcgttcaaacaatgaaatcatgacaaaaaaaagaggccccaaaaaggcctctttttcgtatatcgtcaggcaagcttctgtccgcaattcgggcaaaaattcgcgccttccgttttcgttccgcagttcggacaaaatttcggcttagccgctccttccgagccgttcgccggtgccgtcccctgattctgctgactttgattttgctgcggctggttctgctgattttggttcatttggttcatcatttgatttgccgcattcattcccatcatcatgcccgccatgtctgaggcggcgccgcttccgctcattttgccggatgacattccgtccgtcatggaaatctgctgatagcggttcacatcgcccaccatgccgtaagaagcgtttttcgtaatcatatcctgaacttcctgcggataattaaagctcataatattgaagcccgtaatcgacatgccgtctccgatcagctgcatatcaagatcttcttgaatcccttttccgatttcaaaggaattcgactgcagattgaacatgtcttttccttctctggtgatccatttcatcaaaagctgatcgagaatagacgtaatccggattttaatgtcctccactaaatagctgtctttgacacccgcaaccttatcaatcaatccgatgtagtcaatgaccttgaagttaaatgtgccgtttgcgcggatcggcataccgcccggcatacctgccgccggaatgttgatagcgttttttgtgccccacttcacggtgaactccttcgtattcacaaacagcacttcagcccgcatgccgctgttaaagccaaacttaaacccttttagtgtagatagaaacggaatgatttctgattcgatatcataatcgccgtcatcacggaaaatcccttcaatcttcccgttgtataaaaagatggcatcctgtcccggccggatgatcagacggctgccttttttaatttcacggttgttccatttatagaaaaccatgtcatctctgaattcttcccattccaccacatttgctaactgatttctgaaaaaacccatgtatgctcaaatcctttacatataatttaaaaacttcccttgcttccgctgtaactcgtgccgcccctcgtgactccgccgtcattgtcattatctttatcaggctttttttctcttgtaacgtcggttcggatatatgtgtcgtgctggctcagcacttcagacgtatcgtgattcatatacgtgctgccggtgacggtgaccttgccgccggaattgtacaccatcacggtgacggcgattccggccgcggctgcggcaataatgagctgaaaccaccatgtgagcagcagattgtcagacttgtcgtccgggcttttccccatatctttataagccatcttgatgtaggtctgaaacgccttttcataatggcctgcggaaatatctgacgagatcgtatttctgatcgtattcagccggctgttattcaaatacgtctccgcctttttatatccggagataaatacttcccgatttttcatatcaatggtcaaaatcgccgtgcttccgctaaaatgactgtcataaaaatcaccggcgtactgctcgatgtccttaccgcccgttccgtttgcggtaagaatgataaaatcggtatggcgctttgccccgagcttcccggccaattcctcaagtttcttcgtttcatccttcgttaataaatgagcattgtcataaacatattgcttctgttccgcggcagacgccgatgtatgtaaagaaaaagacatcatcagaaaaaggacgaaacagaagagacacgctttttttatcgatactttcatcaaaaaccgcctcctatcataagtgagacgagtcttaatgctaaaaacgcaccggcggttatgccgccgaaccacgcggccacttttccggcactgatcggcggtttgccgacaaccttgcccgtctgcccgttcatcgcaaaaatgtgctcagcccgctcatagtcgtagctgaccatccagaccggaagcagtacgtaaaagctgctgattttatcggtctgaatctgctcatccgtaatgtcagccgtcgtatatccggagaaggtggatctgatataagaatcaatataatggctgattttatccttcgcccgcggaaagagatcgtcatcggtataattgtacttttccgcaatatatcccgctaaataggccgtattaaactccttcagctcactgtatgagtaaggctccaatttgtccattaattcatcattcattttttctgaagcgtcgaccggaattttgagataatcaagattgatatcgcggtacgcgttgtaatattcggtctccgtcacccggtattctccatcttcatagtgatgcactctcgtacaaacggcattgacctgaaccttgctgtttaaatcaaacatccaaaacggcacgtacatgcccgttatgctcttcacccgatcggcagacataaatcctttcggtgtcagccggccgtttcggcaccactttttaaaagcgctcatggcttcttctttactgatcgtaaaaggaatcaccatcgaaggcgcgagatttcccgataatcggtcggcgagaacggcggctcctccgcaaaacccgcacgtcgtggccgtcgtttccgcctcagtcattaataccgcaccgcaattctcacagcggtactcgttcgcctcattttctgaaaatctcgtcgttatatactcttttggcaggctctcaatctgatcctgccgcccgcagctatgacatgtcagcatgccggatgaactgtcaaagaccatatcatcgccgcagttcgggcatttataagaaatgatcattctgtttctctcactttctctttatatcggacaaagctgcagcccgctgtctattgatctttactgaaaagcattttctgcttaagcgccgccaattcatcatcgacactgctttgattgctgtcatatttagccgtcagatcgtcaatatcgtctttcggagacgcgttcagctcagccatcgcattggcatgatcaagcgcttggttgaccttgtcttccattctgccgaaagctgtcatcgattggcccgcatttgacacagaggaccccaatttgttcattctctcctgcgtttttgccacagaccacttcgctttgatggcatttcggcgcgactcaagctctccgatatcagcgacaagcttgtcatgcattttgcgcatttgagaggcgttggaagaagcgagctgataagccgtctgcagctcggtcagtcttgattcaacagccgctttcctttccaaaaatgtccgcgcatcagcttcattgccggcctgcaatgctttcatcgcataattttccatcttttcggcatcagcctggcattctgttaacgctcttttcgcccgctgttcctcagccatgacagaagccgtctccgctttcacttttcctaaatcactgttcagattccgcaaatattgatcaaccattttttcagggttttcagctttatccagcatcgcattgatattgcttgacatgatgtctttaaatcttcctaaaatactcatttttcattttcctcccaaaattaaatagtaacaagttcacagttatctatactgtttttttcaaaaaaagtttcattttctctttaatttatgtatttttatatgaaaatagtctcattcagcccatttgtgccggcggtaattctttatgaccagatacagtgagaacaaaaaataaacaaacagcccgatcatcaacccgctcactaacggataatgtttcgcagcatacacaaagaaatcaagctgcgaaatctgttccggacttgtaatcgtatccgtcccattcaaaagctttgaaaatttcgccgtatcattccaatcaaacgaatcagaaacaagctcactcccctgataccaattgacagcggcgagacataaaaaacaaaaaacagaaaacgcgcattgcacaataagaaaaacatgtttcatgaaaaacattcctccgcggttcaatatcataggccgtcacactgtacatgacggcagcagcagaaacttggttttactcagaactgataaaaacgtgattgtatgtacttcacatcggttcaatttactggatgcctttctaaagtataccgtatatcgaaaagggtttcagacctaaataaagaggatgcttcccgaagtccgatgactttcaagaagcatcctcgatattttacagagtcactccaacctcttttaagctcggcaaagcatcaatcgcaccgattttagtgcacacgagcgcccccaccttattggcaaatgagacaatatcacgcagcttcgcaaaatcttcggctgccgtctgaatctcatccgtgcgcgccagctgatacagcgccgcgccgacaaacgcatctcccgctcccgttgagtctattgatgtcaccggaatgctcggaatgatgtcaatatccttcccatttgaaagaagggtaccgcttttcccgagtgtcaccgcaacaatgccggccccgagctcatgaagaaccgcaacaccttctttatgatccttcgcaccgctgatgatctcaagctcttcgtcactgactttcacaaaatcacttacggcaacggctttttttgcggtgtttataaactctgaaactcttcctttccataaatcctcacggtagttaggatcgaaggaaataaactgtccattgtctttcgcaatcgacatcagccgtaaataggctgagcaaaacggatcagataacaatgccgtcgctgacccgaaatgaaggattttggcatcgtttaccttttccagatcaatatcatccagcgtaaacaaagcgtccgctcctctgttaaacacaaagtcgcgctccccattttgttttaatgaaacaaacgcaagcgttgtaggcgctttctcatccatgacgagcatagaggtatcgacatgtgcggcgtccaatgtctgcttcagaaaatacccgaacggatctttgcctgtttttccgctgaaagccgcgtctccgcccagcttagcaatggctgccgacacattcgccggtgcgccaccggcactttttaagaaattacgcccttccgtcaaatcaacatccacatcggtacaaaagaaatcaattaacaattctccaatacaaataacagattggcttcccacattatcacactcatttatcaattctcgattatagtttcagtatagtgctttctgtcataaatacaaccgtttacatagaatattttaaattttacgtatacttatctggcagccctttgttccagatcagacatcatctgctgatattttttttcagttaaaggataaaaagaaataagaataatagacagcagaatgaacaatcccgggatgagcgcattcatatttttaatcgcattcaatgacgaggccgtctgatcggtattcgcggcatatccggcgattccgagataaacggccgaaaatgacccggctaacgcaactccgagcttattgatgaaactcatgctcgaaatcaccacgccatcagcccggactccggttttccattccgcataatcgacacaatcggcaaccattccccaagcaagcgtatttaaaggcgtcgtaaaaaatcccgaaacgaaaagccaaaagaaaataagcggcagcgaagaatacgatgtaaactgaaggcccgcataagaaatcagcgatagcgccgccgtgatgatcataacctgcttccggccccgcttctcagaaaagaaaggaataaacagattgctgatcagcgctgcgccgaaaaacaacacggttcctaaaaatacaaattccttatggctgacgttatacgtaaaatagtacaccatcgtgctgagcttaatgttaaacccaatcgcaaacgccaaaaatgcagaaaccaaaatgagcaaaggcttgtttcggaacaaaacggacaacgtttttttcattccttgtttttttcttttttcaggctgaatccgttcccgcacagtaaagaaactgaacagattcaacgcgatgctcaccgccgcatagataagcgccgtcatctgaaatccgaacgcctgatctttcccgccgatggcgtccgcaagcggtgtcgcacaggaaatcgataacagaattccgatataaaccaaaatcatccgggtcgtcgtcagaaccgtccgttcctccacggaattcgtcatccgacccgttaagctgttgaccggaatcgtctgcatgctgaaggacatcccaagcagaatataagtgatgtacgcataaaccatgttccccgtctcgccgaaatgaggggtcgtaaagcataaaaacgtaaatagcgcaaaaggaaacgccacccacaaaagatacggccttgcctttccccactttgtattcgtcttgtctagaatcacgcccataatcgggtcaaaaatagcgtccagcacccttacgataagaaacaaagctgcgatgaccgcaggcttaatgccgccgacgtctgtatagtagaataataagtatgcgtttacaaactgaaagataatattgtacgacatatcgccgaatccgtagccgatccgttccatccaggacaggccgcgatgtttcgtctttactgccgctgctttttctgtttcaatcatcatttcccaccccaagaatccgttttcatttttgataagcaagagggagaatgcaaagatcctccccgttcactcagcgatttggatacaccatcacttttaagcattcatttttgtattgaaaggcccgttccatcgcctcttgcgtctgctccagcggatattggtccgttacaagatgcttcgtgtccacaatgccggaagcgagaaattcaattcccttcggatacgtattcgcataacggaagattccgtatatatcaatctcgttatctgcaataaacggcacattgagcgggatctcgttctgagaaggcaaaccgacaatcgccagttttccgccccggcgcacggaagccagtgcggattgcaatgccgccggattccccgctgtttcccaggcagcatcaacgcctctgccattcgtgatcgttttgatttcttcaccggcatcctgttcccggacattgatgacatgcgtcgcgcccatttttttcgcggcatctaaccgcagcggctccaagtcggtcacaatgattgtgcctgccccgtatgctttcgcggccgcaacggccatcagccccacagggcccattcccatgatcgcaaccgtagaaccgggctggagcttcgttctcgcggccgcatgaatgccgacagaaaacggttcaatcaaagccgcatcttcataggatagtgaatccggaattgaaaaaacaaagtcctgacgcattttaatatattggacaaacgcgccgtcaaccggcggtgtcgctaaaaactgtacatccggacaaagattataacgcccttccttgcacgcctcacagcgtccgcacgtgacaccgggttcgacagcgacccggtctcctattttaaattgatcgactgacgatccgacggcggctatttctcccgcgcattcatgaccgaggataaatggtttttccactacataattgcctattctgccatttgtatagtaatgcagatcagatccgcaaattccgacagccatcaccttaatcaacacttcatcatgattgatgtcaggcacgggcaatgtttcgattttgatttctctcgtgttgtgcataaccgccgctttcatattttgaggcactgtgtgagtcatttggcaaaatcctttctctgctttgaaatgtaagtgcatacatttttgttttctctattactgcccctattttatctgcttttccatacgtacaacagcctttcctgctgtataaaaggacagccgcactgtactttttattttttcatatacaaaaaacactgaattgataaaatagtactaataggaggtgcaggctaatggctgaacttgaaaaccggacacattttgcagaactgctggcacctgccgtcaaatcgctgaaacttcatcctgattataaagtcagaaggaaaaagaacgaaaaaacaggacagtcttatatagatcaaatcgcactccgattaggcgtttcctctaacacgatcaaaagctggatcggacagatgggcggaaactacattcccggacgaattgacgacggaaagctgttcggcatgatctggatcattatagaaaagactgatatggattctgaatggctgaccgatcttctggaaaccaccaccatacccgtcatcaaacccgcattgcccgtttggacggcgtcttgtctaaaaaaagcaaaaatactccggaaagacggatcattcggagcgccgagtgatgaagatgttgaaaaagcagtaaagcggctgtttcatgacagacccggccacgaaacgaatgcgcttacaagaaagtccgtcacgcataacttaccgtcacgccggacggggaactttatcggccgctgctttgatatagaggcgattcgacaatggatgctgtctccgtcaccggtctgtttaatcacaggctgggccggcatgggaaaaacaacgctcgctcttgaagcagcctacctttgtgccggcggttcaccagattggccggcattcaacagcatcatctggatcagcgcggactggaaaggattgagcttcagcgattttttaaacacgatcgcctatcagctcggacgcaccgaacaaatcgataaatcaatcaacgaaaaacggttcgtcgtccgcaatgcattagccgctcattcaaatgaaaaaccagtattgctgatcgttgacagcattgatacagcggaacgtcacattcacgaatttatcatcggccttccgcaaggcgtaaaggtcctccttacggcacggaaaaacgtaaaacaaacataccgggacggcctcggagaactggcggccatccagctgagcggccttgaacaaacggatgcccttgatttttttcatcaagaagtgcaccgctgtttgcaaacatgcaacctcccgcaaaaacgggaaaagctggagcagctgctgcggctatcgcctgcccttaagaatgaattcatctcggcagccgccggcaacccgaaggccatggcactcagcgtcgcttacatgtcagacgacgatatccccgctccccagctcatacaagaacttaaacaagcgggctactcattattggaattgtttgaggttctctttggccgcacatgggacagatgtcatgaagacacacgaaaactatggcagacgctttgctttttcgctaagccccctgatgagaaaagcttggctcaagcagccggattagacgtccggcggtttcattacgcgattgagcaaatgcggtcatatgctttaatacagccggaacgaggcgaaggaagaattcaatacgcagcccatcaaaccgttgtcgcttacggagaacagcacttatccgaaaatcacgaatttgcaaaagaagcccgcagccgctgggcgcattattatattgattatgcggaaacccatttaaaacgggaacggcccaattctgtctattggagctatctgttgggacggaatttagagcaaatgaaaaaggaatggccgaacatcctaaaggtcatcgaatggtcgggcgaaaccggacaacatgacatcctgattaaactcatcatccgcatcagccattttctaagcagaatcaacctgcccctgcgaatcgaatacggattaaaagccgccgatgccgcccgtcaatcaggcgaacacacgcgggaagcttactttcggatcgacacggcaggctgggcgctgatggaagtcaacgattcagacggagctctcaggcaaatagaagccggcctgaagatactcgaacaatcaggcgcgccggatcacgacgacttgaaagtatggggaaccgccctgcaatcgaggctgctgttaaaaatcggagaatcggacaaagcggcagcaatgctggacggcatcaaagatcagcccgtctcgcccattatccggcacagggttcttctggtccgcggcgacctgagtttcgcccgctctcactacgaagaagccatcacattatacgaagcggcaaacaaaaccagcgccgcatacggcggcgaaaaaacgatagaagcctatttcaacctcggcatggcttacgtcaagtgtgatcaactcgaaaaagcggaaaaagcctttgaacaaatgctctatgacaaacacaacgccaatcaagttgaactgatttactatcattacggaatggcacagctgttgtatcgaaaaggagaaactacgaaagcgatagaagctaatcaaaaggcgattcgtctgattgattcgtgggagcctgggattgggattcggggtggggttgagagattggaaaaggtgattaaagaaaacaactagtacgcatagtagttctgtcatcaatctcactcaatttcttcattataaataggaaaggccaattgaagtcgcagttggcctttcgtttcttattaaggtctacaaatgtattgaatcaggttttcccgtatgtattctttctcgtataaaggaaagcgtatcatttgccagctttttgcgacaaagaacaataccggaatggccacaattgtagacaaatcttgtaggtttcccccaactttcccataaataatctgcatcttttaagtcaatatattgatcgtgttttgcagaaatcagcagaatgttatctttattaactttaggcaaggcttgactaggatttgtgatattccaatattttattaaatcttcataggtcacaccatcttgttctaattcttctcttatgtatttacctgggatcgtgttccatatcgaataagaaaggcgattggcataaaagattgataccactacatcaatttgagattctagggtagctattagattagtgacccatccccctaggctgactccaactatgataacaggcccttttttatttgcttttatccagtgaattaacgcccgtaaatctacaatagcctgtcttgtcgactcaattgtacgatcaatgtttgcactgatcatcaactcgccactatacagtgaattttccggttctctttcaaaatggtatggaagagaataataatacatattccagcctaaatccttcattatacggttatgaaagatttttttaattctatcgtacgaatccatgcgccagccgtgtacaaagataacattgggttgatctatatcattttcatttaaataaacctccccttttaaagtatcattaacaggattcccagattgaattaaggattcatagctaaatgttccaaccctataactttttttagattcattcaaattgaatgaaacatcagctgtatttgcactgtaaaattcctctctatcatcaatatcggctgtaatagcagcagaaaaatgtttatctttgcttctttttctgtgtaaatcatataaagcaaagcgatctatcatttttgataaatgcactattaagtcctccttgattatcataaaaaataatatcagagttgataattgggttgtctgtctccatagagttgggacatagacattttaacaggatttctatttgacagtgctttcctaggggaaaccgtctaagagggttggtggcactatttatttagataactgggtctttttcttttcggtaacaaaatctgtttcggttatcggcagaataaagagaatctctccctggtttgcgatcatgaaattgcatatgaagattctaatggagctttgagtgatatatgtgattcatttaccgagttggttaataagctctacgaggaatgaatggatatagaaaatgaccaaacataaataactcaattgccccttccctttgtggataagggcaaataaagcatgtgctgaaaaaatcaaaccataaaagacctctattttgaaagaatctcctgatttcttttttacaaatttattcggaaacttttattccaatgtccttgctacagaagtaatgcccgaagagaaattgcctgaccgcgcatacattatcgacgtgatgtaaaacagagaataaacctcaaaaattagggagaacatccaacaacatgctctccctttttttcgcgaaaaattattctgctgtcactttatacaccttactgagaggtccagtgaagagttccttcgcggatgtccccgcaaatgtctcaatagcattctgtacatgtggaagcattaggtctaggtaacgaagttcgctgcccttcttatcagcaactacctggacggaaccaaacatatcaggatggtccttcagatatgtgacgtatcccttcagctttgcaacgctgtcgccaagccaatcgccgtgtgggtcaacaatcgcaggaacaatactaccgtcgttcaacttctggaagaagatgaaatcaggatacatgttctcccatacgctgttcagcatgtatgggatcaccagcgaagcattcaagtttcttgactggttcctgtaccatgcaacattcagcgagcgagaaagctctgttcgaacgaccttcttctccaaatcattcagattcatatatgcccagccatcctcatcactgataatgtgcttcggataagcatcataatccttgttctgacgagtaatgctggcctggatgttgagattacgttcgatataaggcttcgtgttaccttcgatgcgctcccacttctccttattctcttcagacactgcataacgctgcggactataaatgtccagcagctccttggtcttgttctcagcccaaacttccagtgcctgaataatctcaatacaggcaccaactgctgaaatacggctgatcgcctcaacatcactgtcgaattcatcgttcttacgtctattgatgaaatacttcaccaaatcagaagcgccagcaaacacactgactgcacgccgatagtacgatacaagcctgtcagcatcattctgaaccagctcttcgcggtcttcgaattcctctcccgtcaacgggtcaatacgcttcacactcactatcgtattgctaatatccgtgtatgcgcgcttataatctccaggatgacgcctaatctcgccctcgacgttgttatagaaatcctcatctatctggcttgctgtatcataatcaatatcaatatcagatgtaatcacgtcaacgcaatcccacaggtcgaggaaatgattcggcttatcatgtcgtaccctacgcgtaataattccctcaaaacttgtcttaatatcttcactgttaacctttggaattcgttccagcgcagctgtcagctcctcctcagtctcagtaacaccttcaatatctgcaacatagaatccttcgtcctctgtattcacaacgaattctgttccaacgacagcttcctgtactgactggtgtgtcgcaggagctccatgtatggtcactggaggagtatctgcaggcaatgcctgcgttggtgccgcagtaccagttgatggctgctgatgcttcttctccagcttctgttcaatctttttcttcgcattatcgaagaaacttacatcagctggattcttcaaaatagttgtagtcgcgacagccacgttgtcttctttcagcttctgaactacgccttcgactgtcactgcgtcatactcaggaaggtagcaggcaacagtattcaattcttcaactaaatcaattcttcttgcaagcggcgtacgaatcatacgaccaatcatctgagcaatatatgtcggatctgtacgcttacgacgagaataaataacctcagcacgcggacagtcccaacctgttgatacagcatccttagcaaacaggattcgaatctctgtccgctctgctacatcttcaggactcacatagggaattttgcctgcaggtgtaacaatatcttcatgttcaccaaatacgttggcaaagcaatcggaaatgtccagccacggtaaaaccttttgtatatgtgcacacaatgaagtcagggtatcttttgtaaccttgtcttctacctgtacaaccatcaacggcgtcacgactgggagaataccgtgatccgtacaataatccttccaagccttagaagacgctgccaacttaacgcatgcctgcgttaaatcctgatgtttcgtatccgcagatttcttaggtgtgcgcagttcaatcgtatccttaatcagcccagagttacgaacggacgatacagacacatcaacagacgcctttatatcacgattcttacgtccttgcatagcagcattaaatcgctcaggggtagccgagataccgacaacgcaaggcattgacggatttactccgtcctgaccatcaattaatttggcataaatcgttttattcgtggattcctttatagcatccttgccaagtccgcgatgagcctcgtcaatgaaaagatacaaatgaatgtctggatcgctaatcgtgtctgtcagaacatcataaaatgttcttcctccttcaggagggttagccagtttaccctttgcagacaaaagctgtctgttcaggaaataaatacggcccggcatcagcttgatatggctcttcacaaaatctggcccgattgcttccatcacagtagctcccgtaagcaaatcagaagctgcttcaaatcgcttcatcgtctgttcgttcaagctcgggctatcagacaaccacaaaatcactgcatggtcatctccagcatatgtatcattgctataaaacaaaccttctgctactgctgcagcgataactgtcttaccagcacctgtcggtgccgtaagagatactgctgagacagagccatctgaagcatagcttcgctgcatagaatccattttctttagaatgtcattgactgcagacttttgaaaatcaaataattcgtatttcatcaatcaagtcctccttcgccactaatttcaaacgtccttaaataagtctcatacaatctatggacgttgacacctggaagacgtttgcacatattagaatatcttctttggtcgtcagtcacgacgaatactgtcttaatagacggagtcttcttgaccttatcgcagaacttacttgcctgattgtaatcaaacaggacgccatagaaatcagtcgtcagataactctttccgatgcgtttaataatcgggcctctgcagcctgcctgcgtccaaagaagcggcgcaatcgcgtcaaaagcttggtcaagacgaatcggccatgctgactcgtatgtaagctcacagaaaatagcatttgcattaaatccatctgctttaggcaattcgtatcccaaatcaatgtcttttgctggctttccataatctccatctagtagatttccttccacatcatacccttcaatcgaacattttgtacgaggccatgtgacgtaatgcgcaatgccatgctcttcccattttttatcaccttggcgaagtccttggtcaataaactttttttcttctaccgcggatacttcattattagtcacacaaacacaacgcctatgaccgccatcgagtgcattcaaaatattcactgcatgaagtgttgtccctgaaccagcgaaaaaatcaagaattaacgcatcaggtttttgtgcaacaaaatactttaatgtatccaccacggcataaagagattttggaaaactaaatttcccgtctccgataattgatttcaacaatgaagtcccataggcaccagcgtcataaactttgttttgccatactgtagtagcacgagtaattttcccgccagtttctacgatgatcttacttccatcttcacgttctcctcgaatttcccaacggccttccttaaactttttagcatattttgtacttacatacttgaaaatataaggttgtaaaggatagccctttgacacctgaacaaatcccttatcaaccaaatcctgaagagtttccttagtgactccccagttcatttctacgccatcttctctgataggaaatactgccgttgctccttcaattacaggagcatcttcaattttttgttcaggcgtaagataatcgccaatagctacaatgcgcatagatgtatcatcaacataaatcggataaaattgagcagttccacccttaacagtgcctcgtcttgacgcataatccgttcttcttaaataaaaccatctgatttctttttccttaccatcacccataggatgagttacatgcgctttaccaaacaacagaacataaacatattcgtcagcacgagaaaataaattatcgcgtttagcaccggaaggactaattgtaacgcttaccatttgcatctgtgcttcaggaaatgtttgctccaaaagtaggccgagacgtgcatattctttctcatcaatcgttacaatgagaacgctgtcttcaggatttagcagctgtttagcaagtttcaaacgacgttccataaatgcaagccactttgaatgcctatattgatcggagccatcaacataattattattatatttccagtcttttgcgcctgtgttatacggagggtcgatgtaaatacaatcgaccttaccaggataagcatacgacaaagcctcaagtgcatgataattctctgaattgatgaccatatgatatgggtcatctggatttccacgctctacacggtcaatttccttgagtcctggataaatgacgtcacgataactcacaagaactaccacgtcttggacagcaacagattttatctcaccatcgtgctctagtctcgctgatccgtcttgaatctcctttactacccatggaatcgaattctcatctgtttccttcgagcctctctcaggaagaatattgacagtatccccaacggcaggcttctttttataaagacgaagagcctcaggcaaattatgctcaaacacaagcccgtaagaatggttcttaacgtacttctgaatctgtcgtgcaagctcaggattcagctttgcaacttcagaaatggtctcattgatattcgccatttatacgccctccttttcattatgttcttcaatccatccgtgaataatggcagcaatcgtcgtacctttctcagcagccatcattttcaaggctttcttatcagacactgtcagcgaaagcgacagtgtcgttctcggttcatttgcagcagaaacagactgaacaacggtttgctcaatctgtttctgctccgcttcacgtttcgccatgcaaattatctcctgacattttatgtaatcacacatttaattaattatacatttattcattcgataagtccagcgcttcgcgcactgtattcaccatctcaagcgttgcttccgcgacttttccctttggagcaaattcattgaagcgggagtaggagtaaaggagattcagcaacgtttaggtcatacagacattaatacaacaatgaatatttacgctcatatgaaaccctaatatggaagaaaaggcctcccaccagttcagtaaactgatgaaagaccttctctgataagatggtttttatgaaaaaagttagcatttttcactcggtatgagcaaaagtacgagcatctatctttttttacttaaaaacccctatatatcgaggctttatgatgtttattacatcatgccgcccataccgcccatgccgcccatgtcaggcattcctgcgccaccggcgttttcttccggtttgtcagcgacaacggcttcagttgtcaggagcattgctgctacagaagctgcgttttgcagagcagaacgcgtcacttttgtcgggtcaacgatacctttttcgatcatgtttacccattcgccagttgcagcgttgaagcctacgccgattttttcgtttttcaggcgctcaacgatgacagatccttcaagacctgcattgtgtgcgatttgacggatcggctcttcaagcgcgcgaagcacgatgttgatacctgtttgcgcatcgccttcagcttccactgcagcgactttgttgtatacgttgacaagcgctgtaccaccgccggatacgataccttcttcaacagctgcgcgagttgagttgagggcgtcttcgatgcgaagtttgcgctctttcagctcagtttcagtcgcagcgccgactttgatgacagctacgccgccggcaagtttcgcaagacgctcttgtaatttttctctgtcgaattcagaagttgtttcttccacttgagcgcggatttggttgacgcgtgcagcgattttttcagtgtcgccggcgccttctacgattgttgtgttttctttcgttaccacaactttagaagcgcgtcccaattgtccgatttcagtagatttcaggtcaaggcctaagtcttctgtgattacttctccgcctgtaagaacagagatgtcttcaagcattgctttacggcggtcaccgaagccaggagctttaacggcaacagcgttgaatgtgccgcgaagtttgttgacaacgagtgtagcaagcgcttcaccttcaacatcttcagcgatcagaagcaatggtttgccttgctgtacaacttgctcaagcacaggaaggatttcttggatgtttgtgatttttttgtctgtgattaagatgtaaggattgtcaagaaccgcttccatcttatcagagtcagtcaccatgtaaggagacgcatatccgcggtcgaattgcataccttcaacaacttcaagctcagttgtgaaacctttagactcttcgattgtgatgacgccgtcgtttcctacgcgctccattgcttcagcgataaggcttccgacttcctcatcagcagcagagatcgcagcaacctgagcgatagactctttgccttcgatcggcttagaaatttcttttaagttttcgattgctacagtcacggcttgttccatacctttacgcacgccgacagggttagcccccgcagttacgtttttaaggccttcgcggatcatagcctgcgcaagtacagtcgcagtcgtcgtaccgtcaccggcaacgtcgtttgttttgctggctacttcagctacaagcttcgcacccatgttttcaaacgcatcttcaagttcaatttcttttgcgattgtcacaccgtcatttgtaattaacggagaaccgaattttttctccagaaccacgttgcgtccttttggccctaaagttacttttacagcgtcagcaagcgcatcgacaccgcgaagcatagcgcggcgtgcttcttcactaaacttaatatcttttgccatgttaacgaaacctcctcgaatttttaaaaatatttatttgcttagccgattacagctaaaatgtcgctttcacgtaagattaagtattcagtaccttcgtatttcacttcagtaccggcgtattttgagaagataatgcggtcgccctcttttacttctaaagcaacgcgctctccgctttccaacacgcgacctgaaccggctgccacgattttgccttcttgcggcttttcttttgcagaatccggtaatacgattccgctggcagttttttcttcagattctacgagttcaatgacaacgcgatcacctaatggctttaacaatgtaataacctcctcaatagtatgaatatgtaattttagcactcagctctaaagagtgctaacacaattattataataaagaatctcacttccaatttcaagtcataagaataaaaaattttcacgcttacatcattctctcttacagcgattttctccttttttcacgtctggttcacttatgttacaataagaacaaataagttgattttataggataaaggagtacatatcatttgagaaaacagtattggtatatcattttgacatatgttatcatgcagctttccgcattgatcggcattcctttaatgtacaaattcggctatgcgggcgggcaccctacgaatgcgaatctcaccatggctcaggggatttattccgtcgtaagcttttttatctgcctgattatcgttctcttgattttgagaaccgcgccgaagcagacattaagaaacgggaagaaagcatccgccggcatgtccgttctctgggcggtcgcgggaatatggctcgctttattttctcagggtatcgccggaatgattgagcagtatgtctttcacgtgaacagcggttctgaaaacacgaaagccattctcaacattattaaagccatgccgctcatgattatcgtttcttctatcgtcgggccgattcttgaagaaatcattttccggaaaatcatcttcggtgtattatatgaaaaaacgaatttctttatcgccggactgatcagttccgtcattttcggcattgtgcatcaggacctcacacacctgctgctatatacggccatgggctttacctttgcgttcttgtatgtgcagacgaaacggattattgtgccgatattcgcccatgtcatgatgaataccattgtcgtggtcatgcagctcggccccgcccaaaaatatattgaacagcatagtgaacaaatgcaattaattattggaggattgtttgtatgaggaacccaatgacttggggcttgatttatttcgcagtcggctgtatctttacgtatttggccgcaagctcgccgggaagcatgtggtctttttattccatactgctgatggttttcgccgcttataatatcagcatctcgtttaaaatgttcgctttctcatttaaagtgaagaaaaatcaaaaataaaagaaaagccatttctcatcatggagaaatggctttttttatgctgatacgtcctgatcggattcactgctgccggtctgccttttccggtacgccgcttttgagatcaggatactgatctcatataaaatgcaaagcggaatcgtaatcatcaagtgagacagcagctcaggcggcgcaatcatcgcggcgatcacgagcagcacaaaatacgcgtacttcctgatcttcgataaaaacatcggcgtgatcacgccgagtctcgttaaaaacatgatcagcaccggcatctgaaacagcagcccaaaaggaatcgtcagctgcagcagaaaatgaaagtactcggtaatcccgatcacctggttgacatcgaggtcattcgagacccgcttcataaaatcaacgaccagcggaaataaaatataataagaaaacgacacaccgccgacaaacagcacgatcgaaatcggaatatagctgagtgttactttgcgctccttctcatacagacccgggctgacaaacgcccaaatctgatagagaataatcggcgaagtcaaaatgatgccgatgataaacgcgaactgcaaaaagataaacagcggatccgtcaggttaaaagcattaagggtgagctcttttacttcatcggctttttgaagatacacaatgataggttttgccagaaaaaagccggcaataaagaaaaccgtaaaggataacgccacaatcagcaatcgtttccgaagttcggcaatatgctccacaagcgtcatttgattcactctcatacgcgtcatcctatcttactgttcttctttctttttttcctcttcttcaccggctaatcccttagtagcgttcttaaattcacgaagcgtgtcccccgccgcttttcctaattcgggaagcttcttcggaccgaaaataatcaccgccaccacaccgataaccgccaggcttccaggaccgatcatgtgcagctcctcctttcgctattcaatttcttccaaaacagaataatgcttcaagaaataaaccaatgattgaagctctacagctaaatctatatgatgaattcgaatgtgatccggcacattcaaacgggccggcgtaaagttaaggatccccttgattccgagcgacacgagccggtcggtgattgactgggcggcaaccgcaggaacggtaagaatcgccacgggttcatccttaatgtgaagctctaaatcattaagatcaaagacaggcacaccgcctacctcagttcctattttactctgattcacatcaaaagccatagatatttttgtgttattattttttgtgaaattatagtgaagaaacgccgtccctaaattcccgacaccgatcaaaatgacgttcgtcgtttcatcctgatccagtgtttttctgaaaaatgacagcaggtaatccacattatagccgtatccttttttgccgagcgccccgaaataggaaaaatcccggcggatcgtggccgaatcgacttttaccgcgtcgctcagttcagctgatgaaacgcgctgttttcctgacgcgtgtaaattctttaaaaagcgataataaagcggcagccgttttgccgtcgcctgtggaatttttgattgatccttgttcatgattggtcctccactttatactcagatgcatctcttttaaaatcaccgtttttgcctcctgtcttttccatgaggcaggtcgggccgatgaccattcctttatccagcgccttgcacatgtcataaacggtcaaagcgcagactgaagcggaagttagcgcttccatttccacacctgtactccctttcgtttttacgcttgcctgtatatgaagaacggcttcggaatccttttcctcccagccgaatgaaatgtcgacgctgcttaaagaaagcgggtggcacatcgggataatcgctgacgtctgctttgcggccataattcctgccacctgtgcgacagccagcacgtctccttttccgatctcgcggtttttgattctgctgtacacgtcatgcttcatgtgtacgctggatatcgcagcggcagtacggactgttgaagatttatcgcttatatccaccatgcgggcacggccttcttcattaaaatgagaaaatccattcatatttaaactctccttacttctgatcatacactattttctccctgatgtcttatcctataatgttccaattctgatgtattgtttgctgacagcaggttgataagctacacttaacttattataacagaggtgaaataatatgatgatcttacaaattaatcagctatccaaatcttttggcgctgatcctattttaaacaatataaagcttgaagtcagatctcgggatcgcatcgccatagtaggcagaaacggagccggcaaatcaactctccttaaaattatcgcaggtcacctttcatatgaaaagggtgaattaatcaaaccgaaagaattaacgatgggatatcttgcccagcacacaggcttggaatcccagcttaccataaaagaagaactgctgagcgtttttgatttcctgaaagcaatggaaaaagaaatgcgctctattgaagaaaagatggccacggccgcccccgcggagcttgagacgctgatgaaaacctatgacaggcttcagcaggatttcaaggataaaggcggctatcaatatgaagcggatgtccgatctatccttcacggcctcggcttcggaaaatttgacgattccgtgaaagtgcaaagtctgagcggcggtcagaaaacaagacttgcgctcggaaaactgctgctgacccagcctgatctccttattctggatgaaccgacgaaccatctcgacatcgatacgcttacatggcttgagcattatttacagggatattcaggcgccattctgatcgtttcccacgacagatactttcttgataaagtcgtcagccaagtgtacgaggtctcacggacagaaagcaaaaaatatctcggcaactacagcgcctatttagaacaaaaagccgagcagtacgagaaagacctgaagctgtatgaaaaacagcaggacgaaatcgccaaacttcaagattttgtcgaccgcaatctggccagagcttctacaacgaaaagagcccaaagcagaagaaaacagcttgaacggatggacgtcatggcaaagccgctcggggatgaaaaatcagccgccttccgttttgacattacaaaacagagcggaaacgacgtcctgcgcgtacaggatgtttccatcagctatgacggccagccgccgctcttgaaaaacctgaccttcggcattacaagaggcgaaagcgccgccctcgtcggaccgaacggaatcggcaaatcaaccttgctgaaaaccattatgaacacgctcagccccgaatccggatcgatcacgtacggttccaatgtcacaatcggctattatgatcaggagcaggctgaactgacctcgtccaaacgcgtgctggacgagctgtgggatgaatatccggacatgccggaaaaagagatcaggacatgcctcggcaacttcctgttcagcggagacgatgtcctgaaacctgtccgttctctaagcggcggtgagaaagcaagagtcgcgcttgccaagctgatgctgcaaaaagcaaactttctcatccttgatgaaccgacaaaccaccttgatctggacagtaaagaagtgctggaaaacgccctgatcgactatccgggaacactgttatttgtatcgcatgaccgctactttattaacaggatcgccacaagggtgctggagctgtctccggatcatgcagaagaatatttgggtgactatgactattacaccgagaaaaaagcccagcagctggaactggaagaaatgaagcggcaggaaaaagagcaggctcagcctgccggcaaggtcaaacaggatacgaaaagaacttacgaggaagaaaaagaatggaagaagaaagaacggcagcgcctgagacgcattgaagaaatcgaagcggccgtctcatccgccgaagagaaaatcagcgccaatgaggagctgctgtgcgaccctgacgtgtatcaggatcatgaaaaggtacagaccattcacgcggagaatgaagctctgaatcaagagctcgaaaacttattagcagaatgggaggaactctccttagaagaatagaaaaagtcaagcacctctttaaggggtgcttttttatccacagctatcctccttgtcagccatataagtaagcgttttatacacactatccacaaaattttctgactttatccactttactaacaacttacagtcccttatccagcctggatttctgaatatattcacaatcctgtggatatgttagaattatctgttaataagtaaaaaaagcctcacgttttacaacgtgagacgatcaaaagatgttaattccaaaccgggctgtccgttcatatcatatgagccccggatccccttttcaaaagcaacggttccggcagccgcaatcatcgctgcattgtccgtgcataaagaaagcggcgggatgataagctcgggatctcccgaatggctgaattcctgctgcagtgcggctctcagccctttgttagcggctacgccccctgccagcagcacttgtttaaccccgtattctttcgcggccttagaggtttttgccgtcagtacatcaatgacactctgctgaaagcttgcggcaagatcctcaggaggaatcacctcatttttttgcgaggcgttatgaagcgtgttaatcacggctgacttcaggccgctgaagctgaaattgtaagacccttcctccagccacgcacgcggaagcggaatggaatccgttcccacagcagccagcttatcaatctgcggccctcccggataaggaagccccatcgttcttgccactttgtcgtaagcttcgcctgcggcatcatccagcgtttcaccgataacctcgaatgaaccatgctctttcatataaaccaattccgtatgtccgcctgacacaaccaaagcaagcgccgggaattgaagctctcctatcagcctgtttgcataaatatgacccgcaatgtgatgaacgccgactagcggtatttgatgggcaaagcttaacgcctttgccgcattgactccgattaacagggctccgacaagtccgggtccttccgttacggcaatcgcatcaaggtcatcaaagcccatctccgcttttaaaagagcttcctcaatcacaagggtaatctgctccacatgatgtctggacgctatttcaggcacgaccccgccgaaacgtttatggctttcaatttgagaagcgacaacgtttgaaataatttcattcccgttttttacgactgaggccgctgtttcatcacagcttgtttcgattcctaatacataaatatcttgtttttcactcatgtaatgtcacccacattaataacgcatcttctccgttatctgtatagtattgttttctgattcctccggcctgaagaccgaattttttatataaggattgggcgggatgatttgagaccctgacttcgagagagagccttcttgcctttttttctctgcacaattctatcgcagagcgaaacagcgcttctcccaatgattggccccgatattccggcttaatggctatgttcgtgatctgcgcgtcatctataataatccagattccgcaataccccgccagacagccgtccttttcaatgacaaggtagtgagcatacggattttccaaaagctcatgataaaatgaatccttcgtccacggagaagtaaaggatgctgtttcaatttcataaatttgatcaatatcttccggacgcatgcttcgaatcgccgttttcgttttcatccctatcaccctatttttgagattccatccatttcgcttcagcctctgccagacgcaaataatccggaacaaggctgtggacatccgcttcctctttttctaagcctaaaaacgccagctctgacggccgcggattatgctgtgcagccgttccaatcactgcttgagatgtcagctcatgcagaatggtttcttcatgaatggctgtatcgtgccctaaaaataaaaccggagacgctttttctttcagcatgccgagccaatcagtcaaaaggacattctgatctggaagaacggattgtaatcggccgtcctgatattcataaagtcccgtatatacctgtccgcgccgggcatcaaataacgggcagatcagtccttgaaagtgccgtccgttagccgccagcacctccaggctcgagacagctgaaaccggaagcttcagcgaccatgccaatgtttttgccagcgtcacaccgattctgacacctgtgtacgatcccggtcctttcgccaccgctattttcgtaaggtcctgcggtgttatgccgcaatccttcagcaatgaattgacagcaggcatggcccgcacggaatgattcttttttaaatatgtaatatactccgccatcaccgttttgtcacgaacgagcgcggcacccagtgtgtaatttgacgtatcaattgccagtattgtcatgtttatttatctcctcacaaagcgtttcataccgtgttccgcaagccgtaaaggtaatgtcccttgcctcatcaccggctcttgtgatgacgatctgcagccgttcagcaggcagctgatcctgaattaaatgagcccattcaattaaacagacgccttgtccctcaaaatattcttcaagccctaagtcttcgctttcatcctccatacgatacacatccatatgatatagaggaagcgaaccgtcatggtattcttttataattgtaaaagtcgggctgtttaccactttcgtgattcccagtccttcggcaaaaccctttgtaaaagtcgtttttcccgcgcctaagtcgccttccagtgtcaaaatgtctcccggctttgccaaagaagcggcaagcttggctacggctttcgtttcttcggggtttttcgttctccattgtaatgtcttcaaagtgagtcacccgtcttatttaaaatgattgtatccttttttctcaaggacgatttgtctctgatcattggctgtcaaaagaacacatgcttccttccgttcagttaccgctcctatcttcgcaatcggaatgcccgattgagtgcagtaatcaagcaaagaaatccactcttgctgagaaaccgttccaaccaattcaaaatcttcaccgccaaataacacccatttcttccactcagaatctccctcaggcaaatccggatgcaccggcagaagttgttcttcaatttctatcgtaactgaacttgccccagctatttcatgcagctcactagccaatccgtcactgatatcattcagagccgcgcgctgaagcttagagcagaagcggccgacctgaactctcggaacgggccgtttatgtttttggataaaataatcagtcgtatgaaaagcagaagggagtgtttctcccaataaaagagacagtcctgctgcggacgaaccgatatcccccgtaacaaacacaacatctccgggtcttgccgagcttcgcagacaagcgcaatccttctcaacttctccgatgacagtaacggtaattacggcttgaccggaagcggagacggtatctcccccgatcaaatccatttgatatagtttcgccagttccgccattccttcatacattgcctggacgtcagctttctgccagcaagaaggaaccgctagagacaccaaataaaacttcggaatgcctcccatcgccgccacgtcactaatgttaacagcaagcgccttataaccgatatcatgaggagaggaatactctaatttaaaatggacattctccaccattgtatcaaggcagacaatttgctgcatatggggtgatgctgtataaaccgcaccatcatcaccgatccctacatcgacggaaggatgataatgcgaatgcggcgtaatactgtgaatcaaatcaaactcatccatatatctcccgtctccctttatgacgctcttgtgaaatacagctctttctagtgtatcggattatgtttcaatatccaagactttaacgatataaaagaaagcttggttagataccaagctgccagcatttaaaagaaaacacaaaaaaaacgaaaacatgatcgtttcgtttacaataaaaatggcggtccggacgggactcgaacccgcgacctcctgcgtgacaggcaggcattctaaccaactgaactaccggaccatttattttttggttgcgggggcaggatttgaacctgcgaccttcgggttatgagcccgacgagctaccgaactgctccaccccgcgatgataaaattttagaaaagcttggcggcgtcctactctcacagggggaaacccccgactaccatcggcgctgaagagcttaacttccgtgttcggcatgggaacgggtgtgacctcttcgctatcgccaccaaaccattgagagtgttctctcaaaactagataacagtaagcatacattcaaattggttaagtcctcgatcgattagtatctgtcagctccatgtgtcgccacacttccacctcagacctatcaacctgatcatctttcagggatcttacttccttgcggaatgggaaatctcatcttgaggggggcttcatgcttagatgctttcagcacttatcccgtccgcacatagctacccagcgatgcccttggcagaacaactggtacaccagcggtgcgtccatcccggtcctctcgtactaaggacagctcctctcaaatttcctgcgcccgcgacggatagggaccgaactgtctcacgacgttctgaacccagctcgcgtaccgctttaatgggcgaacagcccaacccttgggaccgactacagccccaggatgcgatgagccgacatcgaggtgccaaacctccccgtcgatgtggactcttgggggagataagcctgttatccccggggtagcttttatccgttgagcgatggcccttccatgcggaaccaccggatcactaagcccgactttcgtccctgctcgacttgtaggtctcgcagtcaagctcccttgtgcctttacactctgcgaatgatttccaaccattctgagggaacctttgggcgcctccgttaccttttaggaggcgaccgccccagtcaaactgcccacctgacactgtctccccgcccgataagggcggcgggttagaaggtcaatacagccagggtagtatcccaccgatgcctccaccgaagctggcgctccggtttccaaggctcctacctatcctgtacaagctgtaccaacattcaatatcaggctgcagtaaagctccacggggtctttccgtcctgtcgcgggtaacctgcatcttcacaggtactataatttcaccgagtctctcgttgagacagtgcccagatcgttgcgcctttcgtgcgggtcggaacttacccgacaaggaatttcgctaccttaggaccgttatagttacggccgccgtttactggggcttcaattcgcaccttcgcttacgctaagcgctcctcttaaccttccagcaccgggcaggcgtcagcccctatacttcgccttacggcttcgcagagacctgtgtttttgctaaacagtcgcctgggcctattcactgcggctctctcgggcttgcaccctaacagagcaccccttctcccgaagttacggggtcattttgccgagttccttaacgagagttctctcgatcaccttaggattctctcctcgcctacctgtgtcggtttgcggtacgggcacctctcacctcgctagaggcttttcttggcagtgtggaatcaggaacttcgctactataattcgctcgccatcacagctcagccttcacgggaaacggatttgcctatttcccagcctaactgcttggacgcggatatccaataccgcgcttaccctatcctcctgcgtccccccattgctcaaatggtgaggaggtggtacaggaatatcaacctgttatccatcgcctacgcctttcggcctcggcttaggtcccgactaaccctgagcggacgagccttcctcaggaaaccttaggcattcggtggaggggattctcacccctctttcgctactcataccggcattctcacttctaagcgctccacaagtccttccggtcttgcttcacagcccttagaacgctctcctaccactgttcgaagaacagtccgcagcttcggtgatacgtttagccccggtacattttcggcgcagagtcactcgaccagtgagctattacgcactctttaaatggtggctgcttctaagccaacatcctggttgtctaagcaactccacatccttttccacttaacgtatactttgggaccttagctggcggtctgggctgtttccctttcgactacggatcttatcactcgcagtctgactcccaaggataagtcatcggcattcggagtttgactgaattcggtaacccggtaggggcccctagtccaatcagtgctctacctccgagactcttaccttgaggctagccctaaagctatttcggagagaaccagctatctccaggttcgattggcatttcacccctacccacacctcatccccgcacttttcaacgtgcgtgggttcgggcctccattcagtgttacctgaacttcaccctggacatgggtagatcacctggtttcgggtctacgaccacgtactcaattcgccctattcagactcgctttcgctgcggctccgcatcttctgcttaaccttgcacgggatcgtaactcgccggttcattctacaaaaggcacgccatcacccgttaacgggctctgactacttgtaggcacacggtttcaggatctctttcactccccttccggggtgcttttcacctttccctcacggtactggttcactatcggtcactagggagtatttagccttgggagatggtcctcccggattccgacggaatttcacgtgttccgccgtactcaggatccactcaggagagaacgaagttttgactacagggctgttacctcctatggcgggcctttccagacctcttcatctacctcgttcctttgtaactccgtacagagtgtcctacaaccccaagaggcaagcctcttggtttgggctggtcccgtttcgctcgccgctactcagggaatcgcatttgctttctcttcctccgggtacttagatgtttcagttccccgggtctgccttctcatatcctatgtattcagatatggataccactccattacgagtggtgggtttccccattcggaaatctccggatcaaagcttgcttacagctccccgaagcatatcggtgttcgtcccgtccttcatcggctcctagtgccaaggcatccaccgtgcgccctttctaacttaaccgttaaaaagaatcactacgtgatatcttgcattactaattgaatgtgaattacttctgttatctagttttcaaagaacaacgcataggacatgctaacacatgcgttgccacaggaagtggcgcatttagcaggtgttcctatgttttgaaggaatgatccttcaaaactaaacaagacagggaacgttctgtttataagacccaaggtcttatattccgttaaaatccttagaaaggaggtgatccagccgcaccttccgatacggctaccttgttacgacttcaccccaatcatctgtcccaccttcggcggctggctcctaaaaggttacctcaccgacttcgggtgttacaaactctcgtggtgtgacgggcggtgtgtacaaggcccgggaacgtattcaccgcggcatgctgatccgcgattactagcgattccagcttcacgcagtcgagttgcagactgcgatccgaactgagaacagatttgtgggattggcttaacctcgcggtttcgctaccctttgttctgtccattgtagcacgtgtgtagcccaggtcataaggggcatgatgatttgacgtcatccccaccttcctccggtttgtcaccggcagtcaccttagagtgcccaactgaatgctggcaactaagatcaagggttgcgctcgttgcgggacttaacccaacatctcacgacacgagctgacgacaaccatgcaccacctgtcactctgcccccgaaggggacgtcctatctctaggattgtcagaggatgtcaagacctggtaaggttcttcgcgttgcttcgaattaaaccacatgctccaccgcttgtgcgggcccccgtcaattcctttgagtttcagtcttgcgaccgtactccccaggcggagtgcttaatgcgttagctgcagcactaaggggcggaaaccccctaacacttagcactcatcgtttacggcgtggactaccagggtatctaatcctgttcgctccccacgctttcgctcctcagcgtcagttacagaccagagagtcgccttcgccactggtgttcctccacatctctacgcatttcaccgctacacgtggaattccactctcctcttctgcactcaagttccccagtttccaatgaccctccccggttgagccgggggctttcacatcagacttaagaaaccgcctgcgagccctttacgcccaataattccggacaacgcttgccacctacgtattaccgcggctgctggcacgtagttagccgtggctttctggttaggtaccgtcaaggtgccgccctatttgaacggcacttgttcttccctaacaacagagctttacgatccgaaaaccttcatcactcacgcggcgttgctccgtcagactttcgtccattgcggaagattccctactgctgcctcccgtaggagtctgggccgtgtctcagtcccagtgtggccgatcaccctctcaggtcggctacgcatcgtcgccttggtgagccgttacctcaccaactagctaatgcgccgcgggtccatctgtaagtggtagccgaagccaccttttatgtctgaatcatgcgattcagacaaccatccggtattagccccggtttcccggagttatcccagtcttacaggcaggttacccacgtgttactcacccgtccgccgctaacatcagggagcaagctcccatctgtccgctcgacttgcatgtattaggcacgccgccagcgttcgtcctgagccaggatcaaactctccgataaagtagtttgactgactacgcacatcactgtgcgatttatttaaaactttgaattaacaggtacgttttgtcttgtttagttttcaaagatcattataatggagcgggtgatgagaatcgaactcacgacatcagcttggaaggctgaggttttaccactaaactacacccgcgtttgaattggcgcgcccgagaggagtcgaacccctaaccttttgatccgtagtcaaacgctctatccaattgagctacgggcgcttatcaggcgacttaactatcatactaccaatcggttatgatgtcaagtgtttttttatttcttttcgaagtctttttctcgaccttgtttattatacacgcttttgagaatttgtaaagtctttttttgaaagatcattttctcatttgtcgttttcgctttgttcatcagcgacgtttaataatataccatgcacttcaaattaggtcaacacttttacgaaacttttttctcacttgttattcccttctatataataaataaaaaagcaggattcctaggaaccccgcgtctattcagattacccgctcaccttggcttccgcgctattacgatctgttttttcataagcacggaagttttgttcaagctgttcgagcgacagacctttcgtttccggaaggaaccttttcacaaatataacggacgctatccctaacaggacaaaaatgaagaaggttgcagacaatccgatgtttgcgagcaggaccggaaaagtgaaaccaacaaggaagttcacaatccagaggcagaagacagtgacccccataccaagtccccgcaatcgaagcgggaatatctccgacagcatcagccaggtcaccggagagacagccccctgctgaaacgcaaggaaagtgactgttaatgaaagaaccacataaggaagagcaggcgatcctttcagcacgactgacagaactccgatcaaaagcagcaccgcagtcgttccgatcagccccgtcatcagcatcgggcggcggccgactttgccgagaagccatattcctacaaaagtcgcgagcaccgaaatcacaccgttagcgatattgccgattaatgcggcttttgtctcgaaaccagcatcttttaaaatttgagttccataatacataattgaattcacgccggtgagctgctgcactaccgcaattccgatcccgataaacacaatgcggcgcacccacggaacggcaagatccttaaaggcggcctgctccatctcagcttccttatgaaaggcagattcaatctcagcgagctcagacttcgctttctcttcattccttattcgccggagaacgtgcagagcatcttcttttcttcctttagaaaccagccagcgcggactttcaggaactttcagcataccgaaaaacaagaataccgccggaagggccgcgataacgagcatatagcgccaggcgtgagaggtatcaccaagcacattgccgatgacagcattacacgtgaaggcaagcagctggcctgttacaatcatcaattcattttgggtaaccattctccctcggctttccgccggcgacatttcagccaaatacgccggaacggttacggatgctcccccgacggcaagccccagcagaaaacgggagatgaccataacagatacgttaggcgccagtgtacatccaagcgtcgccgcaaagaacaaaacggcaaggataaggatatttttacgtctgccgttatagtccgacaatctccctccgaaaactgctccgatcgcagcccccaagagcagggagctcgccaccatcccttcagtcaaagcggtaagattaagctggtcagcttccgccataaacggcagcgccccattaattacacctgtatcgtagccgaaaagtagacccccgaacgtcgatactaaaatgatggttctcaaaaatgaatgctggctgctatttttattcatcttcaaatcctcctaatttttacatagagataatatcggaatattcagttatcaatatttgcacctataacgtctgcatacaagttctgaccgtacaaaacagttatataagaagaaaatagcctgaaagcgttatcatttatagtgattatccactctccctctcgtcaaattgttattttatagttactttgtagtgaagttataatgatattattggcatttatgttattatcataattttaaaagcgctttcagtcaataaatatttcagaaaattttataacttacctttatattacctatatgtaatcaatttatgtttttaatcaactcattttcactatatgatcaatagttaatctctttttgataaataattgattatatattaaaaacccccaatcagcagttgggggtttttgatttattcttcgtttattgtaacgatcgttcttcctctcgcttctccttttaaaagagcaggaagcgtatccggcagctcttcaagtgtaatttccttttgaataaaggcctccagatctgcaggcttgaagtcatcagctaaacgctgccatgttttctttcttgtctccatcggacagaatacggaatcgattcccaagagactgacgccgcgcaatataaacggaaagactgtagccgggagtttcgttcccgctgtcagtccgctcacagcaactgatccgccgtactgaatctggctgagaactgaagcaagcggctcacctccgaccggatcgacggccgctgcccatttttgtttttgcattggttttaacgtgccgttatacacttcgtcacggtgaatgaccgtctttgctccgaggctcttcaaatagccgctttcgtcttcttttcccgtactggcctcgacctcgtaacctaaggttgaaagaatggagacagcaaagcttccgacgccgcctgtcgctcctgtcaccagcaccttccctttttcaggagcggcatggttttcttcaagacgctggacggacaatgcggcagtgaagccggcggttccgatcgtcatggcttctttaagtgtcagaccttcaggcagcggcacgatccaatctgccggaatgcgggccatcccgctataaccgccaaagcgggaaacacctatgccgtagcttgtcgcaatgactttatccccctctttgaaacgggcgtcatctgaggaaacgacaattcctgctaaatcaattcccggcacgaaaggatacgacgttacgatcttgccgtcaggaatggcagccaagctgtctttataattcacccctgagtagcaaaccttaatcagcacttcaccctcgggaaggtcctgaaccgccagctcccgtacgctgactgaaaaccggtcttcacgttgatcgactactaacgctttaaattgatctgtcatcactacgtctccttaaaatgaattgaatggctttggaaaagcataaaataagtttgatttgttttcaaatgtcctgcctcgtgtagtatgatcaaaagtaaaaacagcgaaagagtggttacgcatcatgtctgataaacaaaacaaagataacaaaaacaacagcagcagcaatcagccattaccggacattattcataccgccgttttcaaggcgccgatacaagttgtctgggatacggtctccactgcggacggcctgtctctctggtttatgccgaatgatttcacacctcaagaagacagtgagtttcagctggaatctccgttcggtccgtctccgtgcaagctgctggatattgaagcgccgtaccgcctttctttttcgtgggatacggaaggctggatcgtttcttttgtcttaaaggaaacggaaagcggagatacggaattcactctcattcacggcggatggaaagagccggaagccgtcatcaataaagtcaatcggaaaagctccgagattcacagtacgatggatcaaggatggaacgggcttgtcaacacgaaacttcgcggggctgttgaggcttaacacagaaggacggacacgctttccgtcctttttttgatgccgatacataaaaactgactttgcaaagacactaacagaagaaccgaaaacttctttcagggggcgctgtttatgtattattacaaagaagagctgatcaatatcattaaaccggacaagccggacccggccgcggccaaggtgcttcaggaaattttaggcgggcactacggagaaatgcggacgatgatgcaatactttttccaaagctctaatttcagaggaaaagaaaaacagttccgtgacctgcttcgcggtgtatttttagaagagatcgcacacgttgagcttgtccagcatacgattaatgcgctgctcgacgaaagcggcgctgagggccccggaaatcaggcagcagatcaggcgccgcttgacgaagcagttaaacacgccaatccgcaccattttatcatcggagcgcaaagttctcttcctgtagacgccggcggcaatccgtggaacgggtcttgggtatacaaccacgggaatctgatttccgatttattggacaatgtcgtgctggaatcaaccggcgtgctgcaaaagacgcgcatttatgaaatgagttcaaatcagacgttcagagaaacactcggttttctgatcgtccgtgacaacgcccatcaaaatgcatttacaaaagcgttggaaacactgggtgtcgaatggggcaaattatttcccgtgccgaattatgatattgaaaaatacccggaatgccggaaattcgttgagatgggttatcataatactcaatttaatttcagactggatccgacacggatcggagaaattctgcagggaacgacgccgagccgaaacggcggcgaattaagtgtgtccgagcctcctaaaggtttccccgtgccggaacttcctgagcttccgaatgagcacagccccggactgaaagatatgaacttgtaacaaaaaaacgcctgtttcgggcgttttttgtttttctgaatatgaggtttgaatgtgtttaaaacggggaatataagccgggagatcttgccatacggccgttattataatgtgagcacattgctgtacatacttcgtttcgaaagttgtcctaattttccagccggccggctgggtatgtttgaatgataatgggaattatgtaaagagaacaatgtcttttctaaggaggcagcgaatgtctaagcaaggaaacttccagaaaactatgtcactttttgatcttattttaatcggcatgggagccatattcggttcggcatggctgtttgccgtcagcaacgtcgcctctaaagcgggcccatcaggcgttttttcctggctgatcggcgggggaatcatcttattgatcggcttggtttatgcggaactgggcgccgcgctgccgcggaccgggggaattatccggtatcccgtatattcacacggacacctcgtcggatatttaatttcctttgtcaccattgtggcatacacgagtcttatttctatagaagtcacggcagtccgccaatacgtggcgtattggtttcccggtttgaccgtaaaaggctccgattctccgacaattgccgggtggatattgcaatttgcgctgctctgcctgttcttcctcctcaattactggagtgtcaaaacctttgcgaaagcaaacttcattatttcgatttttaaatatgtcgtaccgattacggtaattgtggtactgatttttcattttcacccgggcaatatgaccgttcacggattcgcgccttttggcttcaccggaattcaggccgcgatttccacaggcggcgtcatgtttgcataccttgggctgcatccgattgtggctgtcgcgagtgaagtgcagaatccgaagcggaacattccgatcgcattgattgtctgtattatcgtgtctactattatttacaccgtgctgcagctcacttttatcggggcgatcccggcggataccctgaagcacggatggccggctatcgggactgaattctcccttccgttcaaagatatcgccgttttgctcggtttggggtggctggcgacattggtcattttagatgcgattttatcaccgggcggtaacggaaatatctttatgaatacgacttcacgtctcgtctatgcctgggccagaaacggaacattattcagcattttttctaaagtcaataaagaaaccgggacaccgcgtgcctccctttggctttcgttcggtctggctgttttttggacgcttccgttcccttcttggaacgctcttgtcaacgtatgctccgtcgcattgattctgtcttatgcgattgcgccgatttcttctgcggcgctgagagtcaacgcgaagaatattaacagaccgttttatttaaaagggatgagcatcatcgggccgctgtcgtttatttttacctcttatattgtatattggtccggatggcgcaccgtatcctggcttctcggttctcaaattgtcatgtttctgatctatctctgtttcagtaaatatgctcccaaagatgatgtcagcatacggcagcagctgaaatcagcatggtggatcgtcggcttttatgtcatgatgctgattttctcctatctcggctcgttcggccacggattgggcattatcagcaatccgcttgacctgattctgatcgccatcggttcgctcggtatttattactgggcaaaatatacgggactgccgaaggctatgatcgacagtgataaatgacgaatgccggaaagaagtatggtcttctttccggtatttttattttaagggatgacaaaaaagagaacatgcgataaaatgaatgacagtcattcataaaaggaggaacccctctattggcaaaacaaagctcgggaaaatacgaaaagatcctgcaagccgcgattgaagtcatttctgaaaaaggattagacaaagcatccatttcagaaatcgtcaaaaaagccggaacggcccaaggtacgttttatttatatttttcttctaaaaacgcactgatatccgcgattgcagaaaacctgctcgacactacgctggacagaataaaagggaaaacggacggttctgaagatttttggacgttgctggacattttggtagatgagacatttcacatcacccggcttcataaagatattatcgttctctgttattccggtcttgccatcgatcattcaatggagaaatgggaagccatttatcagccttattattcctggctggaaggcgtgatcaatacggccattgaacagggtgaggtccacagcggcattcatgtcagatggacggccagaacgattatcaacgttgtcgagaacgcggctgaacggttttatatcggctgtgaacaggatgtcgatctcgaagtatataaaaaagaaatattcagctttctcaaaagaagcttgcagaaatgattggcagagaccgatcatttttgaccgccgtaaaaatgactgacattcattcataactgaggtgactgtatcatgtattggctgcttgtattgatagccggactgttagaagtagtttgggcgtccgccctgaagcatgcggattcgctctttgattggattggtattttccttctgattgccgtcagctttctgatgctgatccgctcttataaaaaaattccgatggctgccgcatataccgtttttgtcggaataggcaccgtcggcacatatgtaacgggcgtcattttaggcgaatcgttttcaatcgggcaaatattctttttggctttgctgttgtccggcattttaggaatgaaggtatttacgaaagaaactgaaacaaggggtgaacattaatggcatggctgctgttatttattgccggagcggaggaagttgtagcagccgttgccatgaaacatattgacggttttaaaaaaaagtggccgctgattgtcatggtaacaggctttatgctttcattcttttgcctttccggagcgatgcaggttcttcccacaggtgtcgcgtatgcggcttggaccggcatgggaagcatcggcgtttcggccgtgggcatactttggtttaaagaaaaattcaatctgtcacaattggtgtctctagggcttatcctcatcggtgtcatcggcttaaaactgacaacgtaacggcctgagacagctttttaaataaaaaacaaaggaccctaagcgggccctttgttttttatgctgttttgatctgttccgcttttcccgctccgactccgaaaatgaagatcagaacggagactgcgatcagcatgaataacggaaccgtccagccgtgcgtgatgtcatgcagcaaaccgaatacgagcggcccgaacgcggcaagcaggtatccgaatgactgggccatgccggaaagcgccgcggcttcatgaacatgccgggtccgcaggctgaagaacatcatcgccaagctgaacgcacagcctcccgcaattccgattaaaatgacccatagcggagtgagagccgggcttccgaaaagaacgccggcaatgccgataaggaaaaataaagccgtcagtccggcgagtgcgcgctgatttttcattttagcggcagcgatcggcacgataaaagtaatcggcaggactgagaattgcattaatgaaagcatccatcccgccttacttgagctgagtccattctgctgaagaatttccggcagccaagcgatgacggtgtaaaaaataagggattgcagccccatgaacatcgtcaccttccaagcaagcggagaccgcagcagactgcttttcttctctccgtttgtcccagtcgtgcggacgggcagttcgcgtcctcgcatttgcggaatccacatgacaaacgcaatgaaagaaaggatagcccagcagccgagcgcgcctttccagcctaaccccgctgaagaggcgatcggcacgctgatgccggatgcaatcgcgccgcacagattcatagaaaccgagtagacgccggtcatgatgcctaaatttccgggaaacttatgtttaatgagactcggcagcaggacgttgcatacggcgatcgacaatcccaacaggatcgttccgaaaaagagagtgccgattccggcgatggagcgcagcagagttccggctgtcaggacaattaatgatgacagtaacacaatctcggtcccgaagcgccgggacaataaaggaacaaacggcgacagacatgcaaaggccaaaagcggcactgtcgtaatggtgccggcagccgcattggtcatgccgaggctgtcccgaattgaggaaacgagcggcccgaccgatgtcagaggcgctctgaggttggcccctatcaatatgactccgatgaccagcaatatcagttttttacgctgacttgcttgcagaatttgatgttcgtctttaattttcatgttcatcctccatgtgtattgtatctttaaatactgtgatgtattggttgacggcctccatggcctgatccggtttctgtccgataatcgcggcggcaagctgggtgtggatccgtatagcaggggtgatttccaacaggttatggactgacgcacaaagcgcctccgtcatatgctcgtatagatcagaaagcatgttgttatgggccgcctgtacaatggttttgtgcagtttaatgtcagcctcggcataccgttttcgatcttcattttgcaaggccgcttcacattcatccaagcacaccttcagtgctttcaggtcttcgtcattacgcctttccgccgccaatcgtgcagcttctctttcgagtgcgtatctgacttctaatgtttcaagcaaatttgattttttaatatggcggtaaaatgccgcgccgagaacactggatgagctgacatacgtaccgctcccctgccttgtctgaagcaggccggcatgtacgagcgcccgaatggcctcacgcaatgtgtttcggctcacatcaaattgcttcattaaatccagctcagggggaatgcgcgtcccgaccggccatttatccgattgaattaacgattcaatttgcgtcaccacttgttctacgagcgacagtctgcttgttttggatatctccatcaaaacacctctgaaatttgtaggatgattctatcattgggtaatataacataaaagaagcgaagatgtaaatcagcggcaacaaaaaaagagtgagtttttctctcactcttcggcgcttttatgaacgttttatattgactgaggtgacgacaaacttgtcatgacggtggcgggaaaatgaatattcaaagggagtgccgttgtccaaaaagcctacatgctcgacttcaagtatcgggtcatccggccggcagccgagatattgctgatccatatcatccgacttgcacgctctgatttttctgtgtgagcctgcgattttgagctggagttcccgcgtaatatgatcgtagatggaatggttgagcacctcgtcattaatgccgggtataaggctcgccggcatgtacgttttttcaagaacgtacggttcgccttcaacaattctgagcctcactacataatagacgggagtcttttcatcgatggccaaatgtgcggcgacatcttgagacggaaactgcacttcaaaccggatgaccttgctcttgatatctttgccttttaacaaattgctcaggccgagaatttcgttgctgactacgtgaacgtgctcatcctgcatggctgattgaatgataaacgtgccgtgccctctttttctgaaaagcattccttcagccgcaagtgtatcaagcgcccgcttcatcgtcatccggctgcacccgaactccgcagcgagcgtcttttcatccgggatcggctgatctatgtcatatacactgcttttaatcctctttctcatttcgttggcgattttttcgtacttattcatcggtttcctccggctgtataatgtttgatctgtatagactccttacggttatcataaatttttttccctgcttcatcaatgacgttacagccgccgatattgaaattgaaaggatttcctcaaattttctatggaatctcgctcactattatggtagaattttttgcagaaaaggacacaaccgaataatgcatacattgtataacctcaatgatatggtttgagggtgtctaccaggaaccgtaaaatcctgattacaaaaattgtcccgtacactttttgtaatcaggattttttattttctaaaaaataaaaaaaggagtatctgtacatgaatttcaaagtatttctgcttgcagcatctaccatcgcagtcggattagttgaattaattgtgggcggtattcttccgcaaatcgcttccgacttagatatatccatcgtcagcgcggggcagctgatcagcgtgtttgcgctcggttacgcggtatccggcccgctgcttttggcagtgacggcaaaggctgaacgaaagcggctttatttaatcgcactgtttattttcttcctaagtaatctggtggcttatttcagtcccaatttcgccgtacttatggtgtcacgggttctcgcttccatgagcacagggctgattgtcgtcctttctttaacgattgctcctaaaatcgtggcgcctgaatacagagcgcgggcgatcggcatcattttcatggggttcagctcggcaatcgctttaggcgtgcctgtcggtattatcatcagcaatgccttcggatggcgcgttctattcttgggaatcggcgtattatctctcgtttccatgctgattatcagcgtcttttttgaaaaaatacctgccgaaaaaatgattccgtttcgtgagcagatcaagacgatcgggaccgccaaaattgccagcgcacatcttgtcaccttgtttacattggcggggcattacacactctatgcctactttgcgccttttttggaaagaacgcttcatttgagttccgtttgggtcagtgtatgctactttttgttcggtctgtcagcggtatgcggcggcccgttcggaggctggctgtatgaccgtttaggagcatttaaaagcatcatgcttgtgaccgtttctttcgctctgatcctgtttattcttccgctgacaacggtttctttaatcattttcctgcctgcgatggtgatctggggattgctcagctggagccttgcgccggcgcagcaaagctatttaatcaaaattgcgcctgagtcttccgatattcagcaaagcttcaacacgtccgctttgcagatcggcatcgcgctcgggtcagccatcggcggcggcgtgatcggacaaaccggttctgtcacagcaacagcctggtgcggcggtttgattgtcattatcgctgtcgcgttagctgtattctctttaacgagacctgccttgaaaagaaaatccgcataaatgtgagaccgcaaaaaagccaaaggaattccttcggcttttgcggtctttttattttgcggcagcaagctcgtcttctgtcacccatttatgattggttactttttggccgccgtcagtcggtgtatagtcgaccatatagacggttgtctttttggctgaatcaataacggcttcggcgcccttcatgcctttcatatgggatgcctcgatcacggccttatcacccggttttaacgttttatcaccggcgcccttcagctcttcctgaatgacccatttatgatcttcgacgcgctttcctcccgtttccggagtgtaagatacactgtaaaccgttgtatcataagcaccttttacggttccttgcgcatttttcatgcctttcatatgagaagctaaaatcataacgtcactgccgaccttataagtcggattttctgccttctttaaacctttcggcacctcggatgaacctgagtgattcatgtcttcgtgagagtgcgtttctttgtctttcgctttttcgcttcctcctgaagattggctgttgcatccggcaagcgccagaacggggatcaggagaaacatgctgaataaaaatagtctcgctttcatttcaagaactcctttgcctttttgatttttcactttccctttcgtttcttcagtaaaacaaaaagattgcctgtcatttctcctaattcttcaactctctctttattgcctttcatcaggtgaaattgttcacaaaatgtacacattaatggagatgcagtataattcaattatcagataatagggggaactcatcatgaaaacgaaggtttttgcggtggtattgggcgctgttttaatgattgcggggttggttttggcagaagtttcgctttatatggaatacatcacaatgctcggagctatgattttttcttctatatttatgtcagagccgaaaagaaaatttcgcgtcatcaaaggggtttgacttttctattaccgccgtcttctcaggacggcggttttgttttgcatgtcactcagtctatccgcacagccgtttcttctgtgccgtcctgatataaaacaaaatgtggggctgtttgtgctttatcacctgcaaattcaatttcaagcggcagcgccctgacaaaataacgggtttccgtcattgggaataattcgaatggagtctgcccgtctattgtaagatacaatcggttttcttttaccgccaccgatgcatgtgtgtcatcctgaaatgagtaattgccggtaaatctgctgtaaatcgcaggatcgatatctgcttttttctgatctgccggacgtttcggaatcacgtatggctgatcaaataagatgtttacagccgcggcaattacagcttgttcaaattgatacgattgttccatattgctgagataaatcaatgttttattctggtcaatataccggatcatcagagttgaatagcccggccagcctccgtcgtgactgataaccttccctttttgggggctgttttgaatcatccagccaaatccgtatccgaattgctcttcttcattccaatagcccggtgtaaacgcttgatctttagactctttgccgatgatttcttccgtataaaaagcctgatcaaacagatataaatctctaatagcggagttaacggttccgtcaccttgaatgccgtcaagaaagacgacataatcagtttcctcaagttcatccggcagcacatattctccggaatgaacatcatacacatagccatatgcatagttcggaatgttttctttactcagccttctgttataaatccgcgtatcgtgcatacgaagcggatgaaatacggcttgtttcataaattcagcaaaactcatgcctgatacaatttctataataaccgctaacaccacataccccgtattactgtaaagccactccttgcccggcgggaaataagcatccggcttatgctgcttgagcatattgatcacatcttgattaacggcaattctgtcccggtcccaatgtgttaagaacaactccatatagtccggcaatcctgacgtatgatggagtaaatgccgaatggtaatgtccggataaggaaaatcaggaagccaccgctctatcatatcgtcataacgcagcttcccttgctgctctaaaatgataacgcctaaagctgtaaacggcttcgatactgaggccaattcaaagaccgattggtcattcagcatcctctttgttttcagttctgcagcgccgaatgaaccctggtataagatgcggccgttttccgctgccaatacagcgccgtttatttcatgtctttcgtctaaagtgctgaaaagctgttcaaacgcttgttttttcttatcgttcatttcacgaacctccatatacaagctgatttactcttttatacgaacggccgctttagaagtttcaatattttcccttctcgaaacacagtcagtatactgccgttcaggcagccgcggaggtttgatgaatgtcttttattcacacaatactgtgcaggcttcaaattcaacatgcttctcgtctttatttgcaccggcaatttccatagtcgaaaacatcgcgcagacgacggctttgtattcgttcatgacggtttgaatttcaatcaggaaccgttcggatgaagccgcgtattccgttacgtactctttcattttgccgataatatcatctgcctgacggctgaagccggccgcctccaagtcactctcaaactggtttttgttgatcatatgaatatgcatttttcaaggccccttcagcagcattttgtggttatatctactgtaaaggacagacttggataaacttttaataaaatatgaacaaaatatgaattggctcatcggcctgaccggcgggctttcggctgtgctccgtttcatttggactacatgaaataatgacttctttactctgttaaaaacagctcatatatgatctaataccagtaaaatgtttaggaggcggcctatgtcagcagcaggaaatcggcaaaaattttgggtcatggcgatgcttatagcggtcttcaccgtgttcgttttctctttttctgagaatcattcacaaaagaactggcacacggcggttgaccaggcgtcagtgaatgtcttcggccagcagatctttgaaaaagaccgtctggcaaaaacactcgacgcacgtgaggcagaatctcttttgactcttgtgaaacttgcaaatgcagaacatcacatcatctaaaagccattataaaaagcctgtttccctttgacagaggaaacaggctttttccatgtattattgagcatgtttttgttcaataaaccggtcgatccgggcgagaacatccttcatgtccgtacattctttaaagctttcattaatggcttgaatgccttgtttgtattttccgttatgcagcacttcttccgcggcaagctttaccttttcagcgcttacttcatctttttgcactgtatagcctgcatccaattcagtcaggcggcgcgcaaccatcggctggtctttatcatgcgggatgacgaccagcggcacttgataatgaatgccttcatttacactgttcattccgccatgcgtgacaaacacgtcggcctgctccagcacttcaagctgcggcacgtacggggcgatgataaagttttccggcgcctgtttgattttcgacagatcggctttttccccggcggcaatgactacttttccttcaaaatctgagaacgcgtctatgcacagattgaaaaacgcttccgtgtccccgagcaccgttcccattgagatataaatgactttttcattctttaatgcgtcaatcgggaagtcgacgcgcccttttctcttcggaaaactcggaccgataaataaatactcatctccgaatgtctcactttcgggctgaaaatatctgcttgtatagacgacgttcaattcacctgtgttgttcataaattgaaccatgctgtcaggggcgacaccgtatttgtctttcatctcggccaacagctcttcacattccctgtccggctgaaacggcacgcccgattccgggtggagcggcagtattttcagacggtcttcattgaacaggaaggatgctgaagaagagatgccgggaatgttgagatagtcccgcaccagctctcccgcaccgaatttatcataatagacggcgtcgaattgaatgtcctctgcaagccgctgcacaatatgtaaaatctctagtgacgttttgatatgaacctttaaaaatgcaagtatgccggacggactgccgggatcaatgggtgtcattctgagcagatcgctgtgaagatgaactttcgcccctactccttccagtctgcttttgtatttttccgttgagatataatgaacgtgatcgccccgttcgctgaaggcctttgtcatacccaaagtcgggtttacgtgtccttctgcaggaaaattgatcatcagaatatgtttcgccatttttcaatctcctttgccttttttgtgtctcttccatatccatcataaatgacgcggaaaaaatcatgcaaggaacatccgtcaggtctttatgacggttcgatgacatcggcaaaaaaaagacaaggcatttcgccttgtctatcgtgatgattcgtctgtttcttccgctctcagcacgcctttcagatgttcttcatcatgcttgagatgctccgtcatatattgcacggcttttgttttgtcgcccttttttatttcttcaaagactttccggtgctcatgcagaataacttccgcacggtcatctcctttaaaattaagaactctgcaaaaatgaatcagcacattgacatgctcaagcagcatggccagccggctgttgcggctgaaatccacaaggagccgatgaaacgactcgtttaaggaaataatctcagtctctttgacgcctttattgacggcttcttccgtctcccgcagctgtttttcaatgaggtcaatttcactctcagccgcttcatcaataaccagttcgaccgccagtgattcaagtgacattctgattttataaatctcttcaacatccttaacggacaaagaataaatgacaaagccgtttcgatcgtctgccgtcagaagcccgtccttttcaaggagccgcatggcttctctgaccggcgaccggctgactccgaaatccttggccagctgagtctcattcagccgttcacccggtttaaaaatcccgtcaaatatcatttttttcaattgggaataaaattgcagataatacgggattggcttatctaatttaaaattatccatctttcctacctcttcatacaatttaggccttattgttaccaagatcatataacagtttatctatggaagcaacattcccgagcttgtcagcatatctgaggtgccgtaatatggaagtatagttggtcgagggtattccgtaaaccgaaaacaattcattcggaggtgacggaaacatgaagacatactagattgccagcataccgggggacggtgtggggaaagaagcagttccgcaagcggaacgggtgttgaacgcgatcgccgaattacatggaggcattgcctttgagttcacttcttttccgcggagctgcgagtattacttagagcacgggactatgatgccggatgatggatgagaaacgttacagcactttgatgctttgtttttgggagcggcggggaatcaaaatctcgttcccgatcatgtttcgctgcggggactgctcatcaagatacgccgggaatttgaacaggtgattaatgtgcggccggcgaagctcctgccgggaatcacttccccccttgttaacccgaaggattttgatctgatagtcgtccgcgaaaacagtgagggcgagtacagctctgtcggcggcagaatctatcagggtgaggacgaaatcgccatacaaaatgcggtcttttcccgacggggtacggacagagtgatctgtttaggaaccggaagcgttcggctggggttttgccaaagaaatgatacaatttttttaagagatagagagagaaaattgtatgacaaatcgcagcaggggactgcaaggaaacggtaaccactcctttaaatgtggtgaaaaaagaggatatacgtacaagacaggacgattgaagacggtctaatggcatcttcacattaaaagttacatccacaaatatgtctttacacaataaagttagagaggtaaaaaatatgaaaaaaacattttacttttttttgatattatatataattatagtattattacttaattctgtatttgacttaagtaatgtattattaactgttttgtttgctatattcgttggtgcattagtgatttatagcattgcgaaacggagtaaaggtgatgagagaaaaaagtgttaaagaaggttactaaattatttatagcggggtgtattctcgctactgtgttgtctgctttcgctccaagttctgaagcagcttgtcgacggacaaatcttgggactcagtgtgataatgatgttcttcttaaaaaaagggtaaaggtttattacacaaaaaatcaggtaaaaaaagttgtttctagatataacagcatggggtctaataaagggcttattctcggttatattattgggttggtacacccttctactggtttaagtgttttaatgtatcaagtaggagctaataatatgattaagccttttaaaactgctaattctaagaaaaagggtttagagatttcttacacggttaccgtttataagtggtcaaatgcatctactaaggtatctggagtaaaatataaatatagataagactaagtaatacataatgagcaggcgatggcctgctttttttattacaggagaaatgtgcaaaatgaaaaaggaaaactgaagtggaaatcgatctgcatgtcagggagcctgtgtgatgatgcgtttctagcgtgagtcaacggcatccggattgcagggaggattaaggagttgactcactcagtcagcattcaaacaaacttgtttcaattggcggaaacacgtcacaagcgcgacgaaatcaaacggtattgttcactcgatgccgttctgggctgacatctttaaagaggtcagccgggagtacgccgggattgagacggattcccagcacatcgatgcactggcggccttcttcgtcacgcagccggaacgctttgatgtcattgtcgcttcgaatctgttcggagatgtgctgacagatatcggcgcggcgattatgggaagcatcggaatcgctcccgcagccaacatcaatgtaaacggcaaatatccttccatgtttgagcctgttcacggctccgccccggatattgtcgggaaaggaattgccaatcctataggccaaatatggacggcgaaattaatgctcgattcattcggagaagaggaactgggtcatctcctcttacaatctattgaaacggtcacaaacagcggcattctgactcctgatgtcggcggaaaacattcaacggaagatgtcacttccgctattatttctcaaatcaagaacagataatacgaaaaaaaccgcgggcaggaaaactgcacagcggtttttttcgtctcagacgggacggatcacgcagaaacaggccgattcacctgtgaagcccgcaatacggcctgattgatccttttctacagaaaaaaaccgctgtatatcacgaggagcatccagcatctgtttttccagtaatgcggctttctcttcagtcaggcctgcccgttcacaccagacggtaaattgaaatggtttcaaaaagcagacagcggattcaatccggaagccggctgtctccagaaaacggagccattctgtttttttccacgcccgaaagtggctctgatcccgtttcttttcaatgtcattataaaaatggtcatattcatccttttcaggtgcggtattgtcaatgagaagcagtctgccgcccggtttgacaacccgaaacgcttcatgaacaaaggctctgacatcgggaaaatgatgcgctgcgattctgcatgtgacgatatcgaaagcagcatcggaaaacggcatcttttcagcatcgcctttttcgaatgacacgttcgtccatccgtttccggttataaatgcttcagcggctgctaacatttcttccgtgaggtcataggcgataacagagcgtacgagaggagcgagagcgttagccgtatgtccgcctcccgtcgcgatatccagcacgtccatatgcttttcggcaccggaggctgaaacgagatacgccaaatcctctcctgcggcgtgtcctggactagtcacatatttcgcggcgtttttggcaaattgccgctgcgcctgctgtttaattgaatcctccattatactcgggcccccttttctttctgattgctgccttaatcaaaataaacgggttcgtccggatgtttgagatacgcaaacatcttttcaatctgactttctgtattgcgggcttcagatagcggcggcagttccgtttccgcaaaaaaaccggcggcgcttgtttctgttccctccctgatccggccgccgatgatctcgcatttgataaacactttgtaaacgtgggcggcggacggcggatgggaatggcatttcttatccattacagctaacagtttaacgggctttacttcgattcccgattcctcttttacttctttgacagcggtctcgcccggagaaatcccgatatcagcccatccgcccggcagcgcccatctgccgtcgcttttctctcttaccattaatatgctctgatctttaaaaactgccgctctgatatcaactttcggagtgggatagcccgtgtcaccggcgaatacgtctttgatgatccttttgtcggtgccggtatgatgcgccatgatatccacgcttatttttcttatttcttcaaatctctcaatatcatatatgtctttggaataagccagccccgcttgcgccgcggattgaagctgttttgcccattcaagccattttggctccattttttcaccgcccgttatgttaattgacgaaaccccaagagtcaggatattgcaccttgagagtaccggtgcccatgatccgtttctgctccttgttttctgtttatggaggggcgaatcctgccggaaaaacagaaaaaagccattcatttggggactgaccccataatatgagacaaacaaaaaacaccttcaagtttgaaaacggatcgttgttatccgaaattagacttggaggtgtttttctatgagggcaagagtgagttatccggttgaagtcaaacagaaggctgtagaaatgagattggcgggcgtgcctgtgaaggagatcatgcaggaattgaatataaagaataagacgcaggtgcagacatgggtcaggtggtataaagctggggacacacatcgattcgaacaacctgtcggaaagcaatattcttatggaaaaggtccagagtattcttccgaattagagaaactgcaggcagaaaatcgttatctgagacaacagaatgaagtgttaaaaaagtacaacgaattggaaaggaagctgatagcgaaacgccagtcgagcttgtagaagcattgcgcagcacaatgaccataaaggatatctgtattcatttaggtatctcacgagcatcttattatcgttggaagaagaatctgatgaaagataaccctaaataccatttagaaaaacaaatcggcacgttgtgccgagaacacaagtatcgatatggctatcggaaaatcacagccatattaaaaaagggaatgcgtatgaatcataaaacggttcagcgcattatgcagaagaatcagtggcaatgccgggttaaggtgaaaaagcgcaagaagaatgggcagccatatgccgtggccgagaatatattggatcggaactttcagtctgatcgccctctggaaaagctagtaacggatatcacatatttgccttatgggcagaaacaattgtatctttccagtatattggatttatacaatggagaagtgattgcttttacgattggcgatagacaggacacagactttgtcttacacacacttgatcagctgcccgcactgccagagaactgtgtgttacatagtgaccaaggttctgtttatacatcttatgagtatcagaaagctgttaaaacaaaaggcattaccatgagcatgtcccgcaaagggacgcccgctgataatgcctccatcgaatcgtttcattcctcactaaagtctgaaacgttctacctcgacaggttggaaagcactacgacgaccatcgtagaacaaactgtcgaaacctatatacactattataacaacattcgtattcaaacgaaactaaacaaccagccgccggtcacataccgacagctggctgcttaaaggtgttttgatccctgtctcaaaaacgggggtcagtccctttgctgaatggctttttttcattttctatttttctttcatgacgagaacgacgcctgaaacaataagagccgccccgatccagaaggttcctccgatcgtctctcccagcagcagccagccgagcaaagtcccggaaagcggctgaaagaagaaaaacagaccgccgcttgccgcattcagtaattgcaatccgcgattccaaagcatgaacgcgcaggcggttgagatcacacccagatataaaagtccgccccatatctcaggccgggcaagctgagacaaaggaatctcccgaagcgggcccgctgtaaacggggtcaggatgacaaatgcgacgcaaatggaatacgttgtgacgacaagcggtgagtaatggccgggaacccgtttcatcagcacggacatcaaagcccatgtcagcgccgcagccagaagcgagagaccgccgagctggctcgacatattgagatctccgttccccacaatgagcaatactccgatcgtcgccagccctgtcgatattccttttttcagcgttaaccgttctttcaacatcagccgggcaaatacaaccataaatgcgggagtggatgccgtaataatcgcacccatctgcgcggttgataatttcgtgccgatttcctgcgtgacgatcgaaaccgtgttgccgatcaatccgatcgcagcgatcagtaataaatcacgtttatgaactttccaggattggcgtgtaaataaactgagaatcaaaagcgaaagaagcgccaccgcatatctcagccataccagttcaagcggcggaatgaccgctaccacaacttttacaacgacatacataccgccccagatactggcggccaatgccaaataaatcgaaccgaacaatgtatttttcaatttgatgcaccctccgttatcatattaggtcacgtcatatgccctaacggagagaagcgcagtcaccttcctccattaagggcggagaagtgctgccggtacatcatgttcaaataagggcgctagaaacatatcgtttttcacctcaattgcaatctgatttttctcattatacaaggtttgttaaaagacgtaaatgaacggcggcatcggctttatggattgcggacttgcagctggattcttgtgatctgattgtcaaacccgtccgccacaacctcatcaagcatatattcttcatatgcataatcgcccatttccagcccatactcttcagtaaactgcatgatgctgcggtaagccgcttccgcttcatcccctatttggtacccgacggcataaagccctttcggcttgatatggaggtctctattctctatgccttcttctgtcttcatataaaaatgggtgtagttgtagaattcttttttcagaatctgctcccgcgcaaacagtccgccgaccggatgcccctgatcgagttcatgtacccgcatatagcggatcaattcggaaatggcggcagtatattgccgttctggcaaatggagtacgggccgtcctatcataagtgtctcttcatctaatcgctgcaatgagacggaggaaaagtctgtctccaaggcttgttcggtcagcttcaccttcgtccgaatcatcctttgcaggtgctccagctttttgattttgctttcgatttctgaagatttctcttttaaaagcgcgatgataccctcaggggttttgtctgttaagagcggtttgatctgcttcaagggcacgccgacctccttaaacagaccgatgacctggaacagttcgaattgatgataggaatagtatctgtatccgttcgcttttttgatttccggagaaagcaggccgatctcgtcataatggaacagggtttgtttttttacgtggcacagttttgcaaattcacccgttgtgaagtattttctgacgtcttcgctcataatgcctccttgactatacggtaaccatatcctttatgatgatcattgtatccgagagaaggctgattcacaaatggcttacgcaatgaaagctttaccgtctcaaaaaaagcggaagaggagtatcaagtatgacgattgaaatcagaacagtcacggaagaaaaccgtgccgatatactggcgcttcatgtaagtgaaagccagacttcatttattgaaaccgcggaagagtgcttacaagatgctgaggattgccggcattatcagccggccggtctttatgttaacggggaattggtcggctttgccatgtacggatggtttccggaatatgatgaggaaaatgaaaacggcagagtgtggcttgaccgtttttttattgatgaacgctatcagggacggggattgggcaagctgttgcttgatgccctaatccgtcatctcactcaaatatatgattgcagacggatttatttaagcctgtttgaagataatgtgcacgcattgcggctttatcaaaaattcggcttcttattcaatggagagctggactcaaacggggaaaaagtgatggtgaaagagctgtaaaccctctgtataaaagcaattcggcttcttgccaataccttaaatttgaggtaacataaagatattagacgacggtcgacggactacggtcgattattaaaacctgatacagcggagcggaacatggtgatcaggcatctaaatggaggagaagattgtgcttattatactcgttatgtttcttctcgggattattctcgggtttatcggcgccgggggagccggttttgtcattgcacttttaactatactgtttcacgtaccgattcatacggctttaggcacctcccttgccggaatggctttcacaagtttatcgggggcattcagccactaccgtgaaggcaatattcagatgaaaatcggcctcatcgtcggcgtttttgcggcattcggttcgtttttcggggcaaggcttacttcccttatccccgcagatttgctgcattacttgacggcgggcatgctgtttttatctgctctgcttattttagtccggttatttattgtaaaagaaacacaagaagattccggacggcaaagcaatctgaatatatgggtgaaagccgttgtactcggtgtcatcgcaggaatcttgtccggaacgttcgggatcggctctgcccctttcatccaaatcggcttaatgattcttttgcgcttatccatccgccagtcggtcggcaccaccatgcttgtcattatcccgcttgcggtcggcggaggactcggttatgtgacggaaggatttgtcgattatatgctgttggtcaaagtgctgatcggaacgatgtgcggcgcatatgtcggagcgaaattcaccaacctcgtgccgaaagtcattctgaaatcagccatctttttaacaccggccatcgccggtctcatgcttttattttaaactgaaacgggaggcggccgcctcccgttttgttctgttcttcatctgttttcgaagagctttttcagctttgcttccgtttcggtatgatctaccggcgtatacacactgcaacgcagatcactgttgccctgaacctgaaatgaagtcaggttaaagaccatttttcccgccttcgcgtggcggaactcaattaatacttcgggtgccgagctgacttcgctctcattccacagcgtatgaaattccgaatacgttttctccatttcttctataaactgagaataccacgtatcagctacatactggccgtaatacgttctgaaaatggcgatgaatcctttcacaaagtgctcccagttcacggctaaacttcttaattcttttctggaaaacaaaagctctatgagattccgtttttcaggaggaatttgttcaaaatctaaaaatacgtgagccgcggcctggttccatcccacgatatgacaccgcctgtccgagataatggtgggacaataacggagctcctgcaggatttttgaaagggacgggctgataaccgcttcttcctccgcagcaaacggctgcttcacgccctcctcaatggcaagggcgtataaataatttctctcatctttgttcagctgcaacgcatcggaaacggcgtccaatacggctgcggacactttaatgtctctgccctgctccagccacgtataccacgtggtgcttacgccggctaattgcgcgacctcttctcttcggagtccgggcgttcttctccttgtgcccatcggcagcccggccatctgcggagaaattttggcccgctgcgtttttaaaaactctgagagcgcctgcaatcttccttctggtatcataccgaatctctcctctcttaccctggtatttattatactaggataatcaacaacttgtaataggataattgcgagttaaaataaatacataccgaaggaggaatgaccatgaaaagagttgtgatcaccggaatgggagtgatttcacctctcggcaatgatgtgcatacattttggaaacacctgacggaaggaaaatcgggaatctctttcatcgattcgtttgatgtctccggctccaagacaaaaatagccggcaccgtccgtgattttgacgcagaagaaagatggggcagaaaagaagcgagacggcttgaccgtttcagccagtttgctttagcggcagcggaacaggcgcttgaaagctccgggattcagctcgatcagattgaccgtgaacgcctcggcgtgtacgtcggctcgggaatcggcggcatcacgactttgattgataacgttcatactttaaatgaacggggagcgcgaaaagtgagcccaagccttgtccccatgatgatctcaaatgcggccgccgctcaaatcagcatcagattaggcgcgctcggcccctcactttctcccgtcaccgcgtgttccatcggcaatacgtcgatcggggaagcattcaacgccattcggaatgatgacgcagatatcatgtttgccgggggagcggaagcggcgattacgaatttgtcattagccagcttcggcaatgcccacgcgctgtcagcgagaaacgaagaccccgccgcggcaagccggccgtttgacgcggatcgcgatggatttgtcatgagtgaaggcgcgggcatcttagtattggaatcattggatagcgcaatcggcagaaatgccccgatcctttgtgaggtgctcggctacggtgcgagctctgacgcctatcatatggtggcctcccatccggagggaacgggcgcatacctggcgatgaaaaacgctttgaaaaaggcgaatgtttcagcggaagacattgatgtcgtaagcgcccatgcgacaagcacaaaagccggagatctttctgaaacattggccatcaagacattattcggggagcttgcgtatgatattccggttacggccaacaaatcaatgctcggccacatgcttggcgcggcaggcggcgttgaggccatcgctctgacagaaagcctgagacacggcatcatcccgccgacgatcaatctgcagcaccctgattcggcatgtgatttggactatgtagcagacgggccccgccatcaatcgttaacgatcggcctttccaactcattcggctttggcgggcataattcggcgatcgtgctgaagaaatatgaataacgggcatcaaaaaaaggagtgaatcatttcactccttttttgctttctccggttttgttgttaaggcgaaaaaagcgatggaaccgataacggatgtcgtgaacataattgcccccatcgggacggccgtcgcttcattcatccccacaagcggcgacacgatggaaccgagaagaagcggaagcatgccaagcagtgcgcttgcgcttcccgcgcggtgtccctgcttttccatcgccaatgtaaaggtgcttgtcagcgtcatgccgatcgtaatcatataaataaaaattgaaatcaccagtgccgccagcggtccgtgaatgatcgtcatgacgagcagaacggcagtcgccgtcatcgctgtaatcacgccgattctcaacaggcttttttcgtgaatgattccgccgaaacgcccgatgataaagcttccggtaatgatcgccagaccgtttatgccgaataaaacactgaatacctgaggcgatactccgtaaatatcctgatacacgaaaggcgttccggagacatacgcaaagctcccgccgtgaataaaaccgaccgtcagcgcataaccgataaatgaccgatccttcagcaggcttcccattgtccgcacggaatttccgatggagctcggaatccgcttttccggcggcagggtttctgtcagcttgagcgcaatgataagaacaagcaaaaacccgataaaggttaaaaagagaaaaatcgtatgccatgatgcaaacggaagcagtaaaatcgcgcctcccgtcatcggcgccaccatcggcgcgacggcggtaatgaccatcagcagcgagaaaaatttagaaagctctcttcccgaaaacacatctctgacgattgcacgggataaaacgagtcctgccgaagcggtgaatccttgaagaaaacgggcaatcactaatgtagtaatgttcggtgcaagtgcgcaaaacagagaaaacaacgcaaataaaaaaatacatagtaataacggttttcttcttcccttcgcgtcacttaacgggccgacaacaacctgtccgattgtcagtccgatcagacatgcggttaaactgagctggacaagcgatgcgcgggcgcttaaatcttcagcgatttcagggaaactcggcagatacatatctatattgagcggccccagtatcgcaagcattccgagaagaaaagccagcgcaagccgctccttaccggtcggattatgcaacatatcgttcccacctttcctttgtcaatctctcaaaacatttgtatattgtatcataattttttctttatttttaaaagttttcaaagggcataaaaaaaccaagggctgtaacagcccttgggtccgggtcacgcggtaaaaggttttacgcgtgtttttctttaaatgcttttgcgtattgatcagccgctataatggcatccgccacgtcgtcagccgtaacgtcaaaagcagcatgaattgtttcttcttcaatcgtcgcggcttctgccactttcataatgtcctctttagatgcgtctttcaatttgatgtcttcaagtgtgacaggcagccccaagctgatataaaacgcgatataccgctcaatttcctcaagcgaacgtttttccagcgccaattgaacgagcgtgccgaatgccactttttcaccgtgggtcaagtgatggatttcaccttcaagcgcggtaaatccgttatgaatggcatgtgccgcagctaagccgccgctttcaaatcccagtccgctcagaagtgtattggcttcaaccaccgcttccaatgcgggcgtaacggctttcgctttcacagactcataagcgagacggccgtatttgaataataccgcttcacatttttccgcgatagcctctccggcgattgtcggaattccgcctgccatcgttttaccgccattggcgatgacactgcgcgcctctatccacgtcgccattgcatcggcaatccctgatgctaaaaagcgcggcggggcttccgcgacgattttcgtatcgaccagaaccagatcaggattcttatgatagaaacgatagttttcgaacgcgccttgttcagaatacacgacagacagcccgcttgtcggagcatccgttgaagcggccgtcggcacgataacggtatagccgtttatttcatctgatacggctttggccgtatcaagcgttttaccgccgccgactccgatgacaatagtcgcgcctgctttttctgcgatgccggcaattcttttcatttcttcctgggaggcttcgccgttgaaaaccgcctcttcagaagagatattgcttttctttaattcagccgtcaccttgtggcccgcgatatcccatacggttttgtccgcgatgacgacggctttttcaccaacgccctccagatgtccgccgatcgtttcaatggcgttttttccctgcacgtatttggccggactgataaaaattcgttccaatgtcatcatcccttcttcgttgtctctcattacatttctcttattgatagagcagaaatgaaaactcttctgatatcattcctcgttttaaattgatttaaacctcatatacactgcagaaaaatcaattttcacggcattgacaagatgtgaaggtgtctatataatcttcgatattgaagctgatcattctttactgaatgaacaaacgagattgtgaatgattcgtcttaaaaattatttagttctgctggataatttttgaggcgtttttgttttttatatatttttgactgcagaggaggtttgcacatgaagaacatttgcaaggatatactgatgattatggccggagcctttcttattgcggcgtccgtggaatttttcgtcatcccgaatcatttaggggacggcagcaccgtgggaatcgctctcgtgttatattatcttttccatatacctgcaagtattacgactctggttgtaaatttgatttttatcgggctggcttataaatttttaacgaaaaaaacgattttatacacgatactcggtacgggaatgacttctgtttttctcagcatcgtcagctttattccgttcggcgtgcacgatatggtgctcgggattgtattcggcgctctgctgatgggagcggggctggcattgatctttattgctgacggatctaccggcgggaccacgctgttggcgtatttattaaattacacaaagggctttaacatctccaaaagcatgttttatatggattgtgtcatcattttcgcatccgttttagcgatcggcatcaatcatatgctgtatacgtttatattcgtatatctgtgcgccaaaatcgtcgatattgtcattgagggtttccataataaaaaagctctcaccattatgtctgaccaatacgaagaaatcgccaaagccatcacctccgagtacggcaacgcggcgacgattttttacggatacggctattacggcagcaaagacaagcgcattatctatgttgtcattaaaaagaacgaattgctgaaaatcaaaaaacatgttcaaaaaattgatccgaaatcatttatcgttattcatgaagtaaaagaagctgtcggagggcaattcgggtttacaaacctgcccgccgccgcaaatgaaaaataaccgcctgcagtgtatagctgcaggctttttttattcggctcttccccgctcaaaggttttttacatctttcaatcgaagtagtaaatgaaaccttttttgatggaggaacataaaaaatgaatatcaaaactgaaaggctcgtaattcggacgtttgaaccggaagattggcaggatgtctatgcgtacacctcaaatccaaatgtcatgaaatatataccagagggtgcctttactgaagaagatgccaggaaattcgttactgaaaacagcggtgaacatgccgggaagtttcccgttttattgaaggatgagaaaacggtcattggccacattgctttttttcagtattttggcgatcatacgtatgaaatcggctgggtgtttcacccggaataccagggcaaaggatatgcttcagaggcggcgcgcgccgtgctggcattcgggtttaacaagatgaaattacaccggatcattgcgacatgtcagccggaaaacatggcttcgcaccgggtgatggaaaagatcgggatgagacgggaaggattttttaaaaaatgcatcccccatgataatgaatggtgggacgaatattattatgccgttttagaagaagagtgggaagtctccaatctggaataaaaaggcttataccctttgcttttacagataagtgtgtgctacactgtttgtaacaaatacgaagggatgatgggtggacaatgattaactaatcttattttgaccgtttgaaatcaaatatttcaaatcagaaaaaataggattagtctgcccattttctatacgatacgaaagctatgtgaaaatagcttatttgatcatgcacaggtacggctaatccttccaaatcaattgggaggatttttttggtcctccctttaaagcgagggattgacatatgaaagaaatgttaaaaataagcggcatcagttatgaaatcaacagcgttcccctttttgaacaaatcagcgcgagcgttcagcaaggtgacatcatcggcgttatcggtaaaaacggcgccggcaaatcgttattgctgcaattgatctgcaatcaaaaagcgccggcacaaggacagatccagatgatgcaagatgtgaacatatatatggtggaacaagaaacggaagcttatgattccggccatccggagcctgcggaggcagccttgttagaaaagtggaacgtgcccgcacgcgccttttcgcaattgagcggcggagaaaaattgaaagcccgtcttgccaaaggtttctcctcctcaagcagccttttgttattagatgagccgacgaaccacctcgatcagcacagtttagaaatactgctaaatcagatcaagaattacaaaggcaccattatttttgtttcgcatgatcgtgcttttatagatgcagcggcgacaaaaatctgggccatcgaaggaaagaaactcattgaacataaagggaattattcaagctatatggaggtccgaaaacagagaaggctgacacagcagcgggaatatgagaatcagcagcatatgatcagacggattgaagctcaaatgaacgagctgagcgcctggtcaaaaaaagcccacgcccaatcaacgaaaatagaaggctttaaagaataccatcgcgtcaaagcaaaacgcacggacgcccagattaaatcaaagcagaagcgtcttgaaaaagagcttgaaaaagcgaaagcagaaccggttgaagcggagtatgaagtccgtttttccattgagcaccgcaaaaaagcgggaaagcgttttttagaagtaagggatgccgcaaagtcatatgacggacgaacgcttttcaaaaacgtgaatttcactgtgatgcacggtgaaaagatcgcgattacaggcccgaacggcagcgggaaaacaacattattgaaggtcatcctcggtcaggaaaaagcacaggacggcagcatatggatatctccgtctgcaaacgtcggatatttaacgcaggaagtattcgacctcccgcttgataaaacccccgaacagcttttttacaaagaaacgttcgaagcaaggggaaatgttcaatccctcatgaagcatttaggatttaccgcagcgcaatggacggaacccatcggcaagatgagcatgggagagcgggtcaaatgcaaactgatggcgtttattctggaggagaaagatgtgctgattctggatgagccgacaaaccaccttgatctgccgtcacgcgagcagcttgaagacactttggcccgatacgacggaacgctcatcatcgtatctcatgatcgttactttgtcgaaaagacgacggacatccggcttgatatctcaaacggcagcgtccgaaaacaatggaaagaatctccctccgtcagggacgatgctgaagaactgcgattaaagcttgagaccgaacggcaggaagtcctcggaaaactcagcttcatgactccggctgataaacaatatcgtgagcttgatcaaaaattcaaagagctgacggaagaaatcaagaaattgaaatgaatgaaaaacccgtgattgtcacgggttttgttttggaaagctcacgtatcatgaagaataatttcaaactgatttgtacaacctacgttcagattaattatgagcatggttcaggggggcgaagaatggccaaacgcatcggaattacgggaaacattatggctgatcaatccggccctttcccgggttataatcgggcatatgtcaataatgattatattcagtctgtttctgaggccggcggtgtgccgtttatattgccggtgattcaagagacggcgcttttaaaggaacaggtctctcatgttgacgggatcattctgtccggcggtcaggatatagacccgctgttttacggtgaagaacctttacaggctttaagaaagacctttcctgatcgggacgcctacgagaaggagctgattctcacggcggttgctttagaaaagccgattctggccatctgccgggggatgcatatgttaaacgtcacttacgggggaactttatatcaagacctgacacacgcttcgtttgctgacattaagcatgatcaagaaaaagatccgccgctaaaaacccatcatgtttcttttgaaaaagggacacgtctccataccttgtttggcgattcagcgcgggtgaattcattccatcaccagatcataaaagagacggcgccttcgtttaaagcctcggcttatgcgaaagacggggccattgaagcaattgaacggacgggtgaattatttgtcgtcggcgtgcaatggcatcccgaaatgctgacaaaaaaacatgaagacatgaaaaagcttttttctcttttcatggatgcggtcagcacataaaaaaagcagatcataacgatctgctttttcattttattcttccggtttctccggtgttttgccttgtgtcagcttatggccttcgatatccacgttcggaatgattttatccagccacttcggcaagtaccaggccgcatgtcccatcagcttcatgacactcggaataatggtcattcttacaatgaacgcatcaaaaagtacaccgaaggtcattgccaagcccatggatttgatcgtagcttctcccgcaaagatgaatcccgcaaagacgaaaatcatgatcagtcccgccgctgttacgacaggtccgctatgtttcaatccggcatgaatggcttgtaccggattttttgttttgacatattcttctctcattctgctgacaaggaatacttgataatccatcgccagcccgaaaagaataccgattgctaaaataggcaggaaggcaagaatcgggcctttttccggaatgctcagcaagccggtgaaatgtccatcctgcaggacgaataccgataacccgagtgttgcggtcattgtcagcaaaaagccgacaacggcggcaagcggcacgagaagcgagcggaaaacaacggtcagcaatacaaacgcaaacccgacaatgagaatggcgaattccgggatcgcatcgtttaaccggtctgaaatatcaatgttcaccgcggttgacccggtgacgagcaggcggatgccgtttttgtctgatcgtttccgtatatcctgcactaactctttcgttgccttatcattcggcccggtttcaggcactgccgtaatgatggcatagtcccctttttcgttcggcatggcaggtgtgacgctcgccacattgtgcaagtccttcatttctttcacggcgtcttgaaatgcctcacttttgttccccttgaccccttttgcatcggcaacaattgtcagcttgccgttaaagccttctccgaatcctttagacaacagatcataggcgcggcgatccgggctgtctttcgctttcattcccgcatcaggcagccccagctctaaatgcatggccggcagactgatgacggctaaaagaatgatgctgaaaatgcttaacagaataggcttctttgtaacgaagcgcccccaggcattcgtgtcggcgcttttcttttctttcttcttgtatgatttcggaatcatccgttttcctgcgattgacaacaccgcaggcaccagcgttactgaagccaatacagccatcagcacactgagtgccgcagtcaatcccatggcagacatgaacggaatgccgacaacagtcaatccgcaaagcgcgacgatcacggtcagtcccgcaaaaacgacggcgctgcctgccgttcccgcggctttcgcgatcgattcatttttttgtacaccttcgcccaaaaactgacgatgcttcgtaaagataaacagcgcataatcaattccgacggccagtccgatcattccggataatgagagactgaccgaggctatcgtaaagaactgtgtcccaattaacgtcagcgcgacgcttacacctaacccgatcagggccgtgacaatcggcagccccgcgatgactaatgaaccaaacgtaatggccagaacgacgaatgccagcacaacgccgacaatttcagatacaccgccgatctcaacaccggcccccggcacatcgccgctgagctccgtctgcagacccttgtctcctgcggcggacagactgtgtttaatatgtgaaacagacgcatccgtaatgtcatccgccgcttttttgtacgtaatatcggcatatgccactgatccgtctttagaaatggttcctgtctcaaaaggacttgcaatcgaagcgactgaatgatctgttttgatcttctttaatgtctcttcaatcgcttgtttttccggttttgacgtcaatttcttcccgtcttcagctccgaaaataacccgtatgcttcctttatcgggaccctttgaaaattctttttgaatgatatccatcgccttttcagaaggtgtgtcgggaattgacatatcctcagaaaaagcaggttttaacgagatggcgatcacaatcgaagcgatcagtatcacgagccacgcactgatcatttttaatcggttgcgggcagaccatccacctaatttatataaaaaaccagacatcgaatactcctctccaatcattactttctgcctaattgtagttcacattcacataaaaaaaacgtacataggggcatgtacgtttgggcagtttttcattatatattcagtttcagaatgcctttttgcatggcaatggtgacggcttccgtccgcgaatcagcgcctaatttgttataaatcgatgttaatctcgcttttaccgtccgctctgagattcctaaatcgaaggcgatcgctttgcttttatgtccttgcgcaacggcttgcagaactatgatttccttgtccgtcagctgtgtttcattggcatttgcccgttccattttcatttcccggaaacgccgcaagatatccggctgcagaagcacttctcccctgaccgccgcatccatcgtatgaaataaggtttctgagcttgtgtctttcagcagataaccgttcgcgcctgattcaatgccttctatcatcagatgatcttcattataggtcgtcaaaataatgatcggcacatcagattgctcttttatctgtttaatggcttccagcccgctcatttccggcatgtacagatccatgagaatgacatcgggctttagttcctctgcgaggcggacggcggttttcccgttttccgcctctcccgttatggtgtaatggtcatttgtttctatcaaaagcttcagaccttctctgacgacaagatggtcatctgctattaacactttatacatgttccgcctctccttgaattggtatgatgatctcaatttgagttcccgctgatttggcgcttgttatacggcaagtgccgttcatcatattgacgcgttcttgtatcccaagcagcccgtaatgtccgctttttctcatttctgttccggcatcaaagcctttcccgtcatctttgacggttatgcggatctgtccctcttcttcttgaacggatacccagacattctttgcttctgcatgcttggcggcgtttgtcaggccttctccgatcatgtaatggcaattctccgccgtatgaacgtcaagcacatgatgcacgctgtaatctaaaaaacaagacagcccggaggcttctgtaaaatggttgatttgttcagtgatgctttcttttaagaacccgatcttttctgatgtgctgcgaaggttgtcaatggccgagcgcgcatcagccaatgtgcctttcactctgtccattgactggctgatgatgtctttcgctctgtcagtgttaccctttgaaagatgaacatgcaccgcttcaagctgcatatgcaagctgaccaatccttgagcaagcgtatcgtgcaagtctctcgccatccgctgtctttcattctgaagcgtcagctgtttcacttgccggtgagcgagctctaatttttcaagcgtcatctgtgtttttattttttcatcaacttgcgcgaaaaatgtggccgcatacgtgataatcacgatcatgatgggagcggcgataacgatgaaacgtagcagatgatgcggatgctcctggtgcagggctgttatggacattaaaatgaaaagatagagtatgagcagcgtttttcccttatccgccattccgataatctgcccgattaaaaaggcatagagaccgacgacaaccgcgatatagccgccggtcatcaagttagccgatgtatatatgataaatccctgtatgatgaaataaagaaacgtctttttcttcacccagcgatgggaatgccagtgcagcacggtaaaaatgacgatcaatatcgtgaataacagcagcaaaaaaaccgtccagctttcataaatgtactgcaaagagactgatgcggcatataccataaaaataaacgccagaccgggcacccgaagcgcaagcatatgcaatgagcgtctgtcacgggagacatagtcttcttgatgttttgtaccaaacaatctctgtccacttccttttagccgaccggcctcacgaggttttattctatttgtcatcataccataagtgcctgcttctcaccttccccttctttcctgcatgacgggtgaaagaaaaaacagcctgcgggattgttcgcaagctgcttttttgtttatatcttttttatgacctttcccgggtttcagcgggctcgtctcccgcgcggcaaaaccgcccacgcatcagaaaaatgttcatgacaccaacagccattccatgtgaacaagaggaagcgattgtgcttcctcttttttttgatgcaccgtcaggctttttctcagctttttctgataaacaaaatttgtaagactagacctcttttctcaggggaaattaactacgtatttctacaagggaggtttcagacgattatggataagcgtgaattagcggctcacgagtcgctggaattacatgaaatcattaacttcaagacgctttgtgtcgcgaaatccaagctcatgcaaggccttgtgtttgatcaggatctgaaaacgttaatggaaaaagacgttcagcaagcctctcaagaccttgctgatctgcaggcggtttatgaacgggcaacgtttcaggctcccgttcctcaaaaccggccgacttcgatcatcaattgaaaggaaggtaagcatcattgaatcatgaccatttagatccgatcaattcattacatgtccctgaacttgcggacatgacattcgcaatggattttctcatacgcgccaaagaaggcgtcagaaataccgccgttgctttaacagaaaccgcttcacctgatgtaagagctttgctgcgcaaacagctcatgcagggaatcgcgatgcatcaggagataacagacttgatggtcagcaaaaagtggtttcacccgcatgatctgagcgaacagtataaattggatcagctctctgcgaaaaataccctcatggtcggaaatatgaatctgtttcccgttgaaacaaacagaaaagggatgtttgaccgcacacctgatgaacactaacactggaggtattacagcatgaaggccgtaacgtatcaaggagtgaaaaacgtcgttgtcaaagacgtgcctgatccgaagattgaaaaacacgatgacatgattataaaagtcacaagtacggcaatttgcggatcagatttacatttaatccacggactcatcccgaatttgcaggaagactacatcatcggccatgaaccgatgggcatcgtggaagaaaccggtcccggcgtgacgaaagtcaaaaaaggcgaccgcgtcattattccttttaatatcgcctgcggagaatgcgtttattgtaaaaatcacctggaaagccaatgtgatcaatcaaatgagaacggcgatataggcgcttatttcggctattcaggaaatgccggcggctatccgggaggccaggcggagtatttgcgcgttccatttgcgaactttacccattttaaagttcccgaaacatgcgaagaaccggatgagaaactgagtgttatttccgatgcgatgacaaccggcttttggagcgttgacaatgccggcgtaaaagaaggcgatacagttatcgttctcggctgcgggcccgtgggccttttcgctcaaaaattctgctggttaaagggagcgaaacgcgtaatagccgtagactatgtcaactaccgtctccagcatgcgaaacggacgaataaagtggaactcgtgaacttcgaagaccacgaaaatacgggcagctacctgaaggaaatcaccaaaggcggcgccgacgttgtcattgacgccgtcggcatggacgggaaaatgacagaccttgagttcctcgccagcggattaaaacttcagggcggggcgatgagcgcattggtcatcgcgtcccaagcggtgcgaaaaggcggaacgatccagattacgggcgtgtacggcggcagatataacggttttcctcttggcgatatcatgcagcgaaacgtcaatatccgatcaggacaagctccggttatccattatatgccgtatatgtttgaactggtgtcaaccggcaaaattgatccgggcgatgttgtaagccatgtcattccgcttagtgaagcgaagcacggctatgagatgtttgacacgaaaacagatgattgcataaaagttgtactcaaaccttagagaacggaggctacagaaatggccagcgccttacatgaattactcgaaattcaggagatggcttcttttaagtcactttgtctgacgaaatccaaaaccatgaaagcgctcgtatccgatccgcagctgaaagaaatcatgcagcaggatgcggatacatcaacaaggcaattgcaggagtttgcctcgattttatctgatgcacagcatgaatgaggagatgaatgacgaatgaatccgattattgaatacttgacgggaataaatgcactgacagaccaaattgtcgcaatggatttattgaattcggcaaaaagcggtgtcagaaactatgcgatggcggcgacggaagccggaacgcctgaagtgaaagcgatcctcaccaggcacttagaagaagcccttgacatgcacgagcaaatctcacgctatatgatggaaaaaggctggtatcacccgtggaacacaaatgaacaagtccggctcaatttgcaaaatattgatacggcgctccgcctgcccgtcctataaatcgttttgctgctgagactgcacccctgactcaagcttcagtattttaaactgtgagctgccttttacagcgcccaggcggctctcagtttttttatgccttcttgtatatcggtttcagaaacccccgcgaaaccgagagaaactgttttttcagggagctgtttttgataggtgagagacacgggatagattttgacgccttgttcctccgccttttcaatcagctctttttcgctgaaaggcagctgaacgtcaagtaaaatccgcagcccggaattttctccgcgaatcctgacgtattgtcccagctcgcgccgcacggcctctaataataccgctctttttttccggtacagctttctcattctgttaatatgtttctgccactctccgcttttgataaattgagccagcgtcagctgactgtggcaggagacggtctgtttatataaagaagcgatttccctgcctttttcgataagcggcaaaggaagaatcatatagctgatgcgcagcgaaggaagcagagattgggaaaacgtccccatataaatgacacggtgatgctgatcaagcccctgcaatgatgggatcggctggccggtgtatcggaattcaccgtcataatcatcttctataatgaacgattgatgttccgccgcccatttcagcagctgaatccttctgtttaccggcataatcgttcctaatgtaaattgatgagaaggcgtgacatatacaagacgcggccgctcttcattcagcttccggatacagactccttcatcatcgacgggtatcggaatgatcttcatgtgattggctttaaaaatctccctcgctctcggataacccggatcttcatatccgatggatagatttgcttcaaatattttgcacagcatttgcaaaagagcagggttcccggcgccgactatcacttgttcaggacggcaattcaccccgcgcgactgatataagtactccgaaatgagcgttctcaattcaagctcgcccaaatcatccccgggccgatacagctcatgcccgtattgatctaagcttgcaaccatacttttgcgccatgctgaaaacggaaaatgagcggcatccacagtgccgtagtgaaaatcaatccattggcggtcttccttcgcctttgtttgaacaggcgaagcgcccggctttttcacatagacggcgtccgagtcataatcggcaaaccatccgcttctcggcttactgacaatatagccttcggcggcaagctgttcataggcccgctccacagtcgtctgactgatggaaagctgacttgacaaaagcctttttgaaggaagcttcagtcctttaggaagacggccctgatgcatattttccttaaaatgccgataaagctgctgataaagcggaatattcagatctctatttaaaaatggcgtgatatccatttttactccctccaaactggcattcttctttttataaaaactggccatttgtataagaccaatttcagtttatagtcattataaactttgaaaatgggtttagaaatatatattggagtgattggaatgaagaaagccgcaaacggctggattaacggatttatcggcgtgctcattttcagcggctcgcttcctgcgacccgcttggctgtagcggactttgacccggtatttctcaccgtatgccgcgccgcgatagccggtatattggcaggcgctctgctcctcatttttcaggagaaacgccctgccaaaagcgacatcatttcactaataacagtagcgctcggcgtcgtgatcggtttcccgctgcttacagccttagcgcttcagcatgtcacatccgctcatgccattgtctacatcgggcttctcccgcttgcgacggcgatcttcggcgtactgcgaggaggcgaacggcccaggccggtcttttggattttctcggctgccggcagcatcctcgtagccggatatgctctgctgcaaggaggagaatcctctccgctcggtgatacgtacatgatcgcttcgattatcgtgtgcggtctcggttatgccgaaggcgcccgcctctcccggcggcttggcaactggcaggtgatctcttgggcactcgttttatcgcttccccttatgttcatcctgtctttctgcttcatgccggactcatggtcaaacatcggcgcgcccgcactgctcagtcttgcatatgtctcaatattcagcatgctgatcggcttcgtattctggtatcgcggactcgcccagggaggcatcgccgcggtcggacagctgcagcttctgcagcctttcttcggactgttactggccgccatgattctccatgaaaaagcaggatgggaacttgcggcggtgaatgccggcgttatcgcttgcgtggcggccgcccggcagttcgcaaatcaatcagaaaagaccgaacaatgaacttgttcggccttttcattatattccgcccgtaggcagcagaagtctgtatctctttcacatgatccggctatttttcaggcaggctgaactcccttaaacgcactcatcaccagatcatgcacataggaatcattcacctcatcacctgtaataagcagacgatagaaaatcggtccgtaaatgagatcgatgcttacgtcaatatcaagattctctcttaattcacctttttgaattcccttttccagaaggcctttcgcttggaggcgtcggggctggaaaaatcgagcgcgatattcttccgccaattttgcatccagctgccccgcaccgattaattccttaataacggttccttcccggctcgtcaaaaatcttgctaaattcgtggcgtgggtcaatatatcttgcactgttgatcctgtatctggcacaggcagtctgtccgtagcggtcgaaagaaagctgtccatgataacggcagccttgtttgaccaccatttataaatcgttgccttacttactttggcacgctcagcaattttatcgactgtcaccgcgtcaaagccattttccaacaatagatcataggctgcagaaagaatcgccttatgtgttccttcatcgcgcggccgtcctcgtttactctgcacatgaatcattccttcccgaattataaacgatacgttcagtatacttaacctgtataaaaaaagaaaacagaaacctatttacaaaactgaacgtttagtatatcattttcttataataaaactaaacgtttagtttataaaataacttgagggaaatcttgatgaaacatagactcccaaagcctctgcgtaaaggagatgaatcagcaaatcatttatcaaagcatcataaaaaccacttaaaaaggagttcattcatatggctaaagaaaacaaacaaacagcagctcagggaatttcacctggtttaacccttcttctcgcaacggcatgcggtatcattgtcgctaatctttattatgcacagcccttggcaggattcattagtgcggcaatcgggctttctccaagcagcgccggattgattgtcacactgactcaaatcggatacgttgccggcttactgtttctcgtccctttgggagacattatcgaaaacaaaaaacttgtcgttgtatcgctccttctaagcgcagccgctttgacactgacagcatttgcgaagcatggaacactgtttttagccgctgcgtttttcatcggactgggatcaattgcagcccaagtgctagttccgttcgcatcataccttgcaccggacgccgcacgcggccgggttgtcggcaatgtgatgagcggcctgctgctcggtattatgctttcccgtccgatatccagtctggtcgctgatatatgggggtggaatgccatatttgctttatccgccgcgttaagtgttgtcctggcaatcgtcttatcaaaagtgcttcctgccagaaaaccaacagcaaacacaagctacaccgtcttactcggttcaatgtggaagctgctgcgcacgactccggtcttacgccgccgtgccatttatcatgcgtttgtatttggcgctttcagcttgttctggacgactgtacctttattattgtccggtcctgcttttcatttttctcaaaaggcaatcgcgctgtatgcattagcgggcattgcaggtgcagcggctgcaccgataggcggccgtctggctgatcgcggcttgacccggcttgccaccggaatcgctctcggtgctgtcatcgtttctttattactcccgctcatgattcaaagcagctctcacgtcggcatagcagttctggtggccgcagctatcctgttggatatgggtgtatctgccaatctcgtactcagtcagcgtgccattttttcgttggcacctgaatttcgcagccgattaaacggattatttatggccatcttctttctgggcggtgctataggatcatcaatcggaggatgggcatacgcctcaggcgggtggagtatcacattatggattggaatcgcttttccggtcatcgcattgctttatttcaccacggagaaataagcctttcaccaaaaataagccgtcaggaccaagctgacagctttttttggggtgtattcttctttacatccatccgaacaaaaaatcccgattcatgaaaagatgatattgattctttacgccccgctcatatagacgggcgcgtgcccgctgccgattctttcagcagcggtaaaaccatgtcataatatgttaagaaataattgcgccataagcaggtgaacacatgaagaagtatttatataaacaccttttgttagctctcgtttcgtccgtttgctttttattggtcttttatgtgggtttaaaaatgacacaggaagacacaccgccgttgtcttcttacccgttttacctttttatttatctttacatcgcagccggatatttgacggtcggccttgttttagcttgtatgactgatatcttgaagaaccgctggacattcaataaaccgtctaccattctattgaaacttatcgtttacttattcataccgtatgctatttttcattctttcttcattttaatggcgccgttgatttatgtgctgtttgagtcgttattcatcctgagaaaagcttcataacctgcaaaaacataccgcatgctgccggtatgtttttaacatgcttgtcagttgttcgcagtgatccgtttgatgttttcttccatcaagccggaaatgagctgttcgtttgtatgaggaatctgtttgagctgttgtacgaccagcccttgtcttgcagctgaatgattttgactcagctttgctttcccctctattttgctgattttgattttaaagccttttacccctttgttcatgcctgccagcactttcgcatcgacatcctctaatttgtacgggctgtcggggctttcgtatttcaatacgagatcactcatcgactgcacggtttcttcctcatccaaaagctccgtctctccgtaaacatgaaccgccacataattccatgtgggaacagcctgattcgtctcataccatttaggcgagatataacaatgaggcccttgaaaaacggctaacacgttttggccatcaatctctttccattgggggttcggcaatgcaaaatgaccgtataagcattcgttatccttactcatcatcaatggcaggtgggttgcatacggcatgcctcccgccgttgaaaacaatgctgcgaaaccatactctttgatgacatcgcacgcttcagcttcactcagctgaaatggagccggaatatacatacaaaactctcctctcgaacatggattgataaagcgctttccgctataataagatatcaactgacatttaaaaaggtacagtttcaaataaatacacatgtcagaggagaacatctgatgaaaaatatgattttcgctttcgaaagcgacaccccgaaatacaaacaaatttacgagcaatttaaaacattgattgagcagggaaatattcaggcagatgagcggctgccttcgattcgggagctggcagattccctgcgggtaagccgtaatacaacgctgatggcttatgatcttcttttagcggagggatacattcgcggagaaacacgcaaaggttattttgcaaatgaagtagaaccttctttatttcaaaaagaaaacgatgttgtccacgctgagaaaaccgaatcaactcagccggccctgattgattttcgcgccggagccgtcgatcaaaagcattttcctctgaaaacatggagaaaattatacaatcaagttttgacatcagagaaaagcttcctgtacggcgaaccgttcggcgagagagacctgcgtgaacaaattgccgcttatctcttggaatcccgcggagtgaaaacagatgcggattccattatcatcggcagcagcacgcagcagatgctgatatatctcagccggattctgaaagaggatttttcgggaatgatcgttgaagacccgggatttgacggtgccagagcggcatttcaatttcacgggctatctctggaaacgatgcctgtctatgaaaacggagctgatttttctcaattacatgcaatgaaagaaaaattaatctatgtgaccccatcccatcacagcccttacggcgtaagcatgtccattcagcagcgccaaactctgatcaattgggtgaatcatagagagggttatattcttgaggatgattatgacagtgaattccgttacacgcagcagccgtttcccgctcttgcttccattcaatcagaccgggtgatttatttagggaatttctcaaaatcctttcttccgggcatccgcataagctatatggttttgccgcagcgccttttgcaccggtataaagaacggtttattcatttcgaaagcaccgcttcttcgcttaaccagctgaccatggctgaattgatgaaggccggtgaatggacccgccatattaagcgcatgcgcattgtttacaggcgaaaaatgcagcacttgatttcatatgtaaagcagcagttcggcggtcatgtgacgatcatcggcgaccagtcgggtttgtatatattgatgagagttcacctgaactatacagaagaaacattaatcgaacgcgcttttcagtacggagtgaaggtatatcctaccgccgtttatttcgttgccggaaagcctgaaccgccgatcataaagttaggtttcgcccatctcgatacggatcagatcacacagggcgtacagcttttgagaaatgcttggctgtcatgaaagaaaaaaggcgccgaacggcgccttttgttatcttttatttcgtatttcttgtgaatttcggcagtccaaatataatggcggcgatgccgcagattccgattaaaacgggatagaaagagtatggcaggatgctgacgggtgaaatattcccgaatttcccggctgataacagctgcgcgccgtaaggaatcaatccttgtatcatacacgaaaagatatccagaatacttgccgattttctgttgtcgatgttgaatttatcagcgatattctttgcaatcggcccggctgcgataatggagatcgtattattggcagcagccagattcgtcacgctgaccagtccggcaatgccggcttcggcgccttttttcgaacggattcgtttcgtgatgaactccagtaaaaagtcgatcccgccgttttgtttcatcacgccgaccatcccgccaatcagcatggacaggatgatcagatcgctcattccggcaattccatccgtaatcgccttaaaataagagtcaagcgtcaggctgccgcccgctaatccgatgattcccgtcaaaaccaatccgccgaatatgacagccatcacattaataccgattaacgcaaaaaccaacacggcgacataaggaagcaccttaatccagttgtaagattcagcacccgtatggccggcgtggcctgccggaataaaaaataagataataacagtcacaatggcagcaggcaaaacaatcagaaagttcgttttgaatttatccatcatttgtgttttttgcgtccggactgacgcgatggtcgtatcggaaataaaagaaagattatctccaaacatagctccgccgaccacagccgcaatcggtatcgcgctggagatgccaagctcgccgctcaaaccggcgctgatcggcgcaaccgccgcaatcgttcccattgatgttcccatcgatatagaaatgaaacaagcaatgataaacagccccggcagcaaaaactgctgcggaataacgctcaaagcaagattgacagttgaatgcaccgctcccatcgcttcagccgccgaagcaaaggcacctgccaatataaaaatcattaccataatgataatatcaggatgtcccgcaccggaagcgaaccattctattttttgattgagcgatttcttccggttaaataacagcgcaaaagctgacgcaatgatcgcggcaatcaagatcggcaatttataaaaatctccggtcaccagaccagagccgacaaaaagccctacgaataagactaaaggcaataacgcccaagggttctttttattgttcatctgggtaaaccacctcttttcagcattaaagtcgctaatcacagtctaagcaacatttcacactttaaaagtctgcagtaaaaaagtcaagctgaaaaaaggataagtaatgattgataagatagaaaaagctgttttgtttccactctttagaaaataaaaaaaccaaggctcgtttcccttggtacatttcatgcggccccgcgtccgggacaccttctcttcattcagaaatacattcagctttcaatctgtttttaagtttcgcttcattttcaaggatatcttcgtaatcctcaatcttcctgtttaatcgttttatggtttcatcaatttccctctgtttctccgtcagccttttcctttcatttataaggatgttttttcggggttcgatcgtatgatcggctccttcaataaataaagcggtatattcaatcagcgcctcaatcgacagcccggcacttctcatgcattttataaattgaatccaattcacatcatcttcgtcataatcgcggatgccgctttcatcgcgttttaccggaggaatcagtcctatactttcataatacctaagcgttgcggctgataactcaacctgctttgcagcctgcgcaatcttcatatttttaccacccgtccttcatacctttcataagcgtgccattatagaatatcatttcataaaaaaataaaccaaactccttgacttaaagtccgctttaacatttaaagtaaaatcgaacagaggattcatcactttatcttggaaaggaagataaccatgtgcaataatcatccgactcgtgtattaagcgctccgcatgcaaaagctaaatttgagcggacaacgattgagagaagagcattacggccgcacgatatcctgattgatattaagtacagcgggatttgtcactcagacatccacagtgcattcgatgaatggggcggcggaatctttccgatggttcccggacacgaaattgccggagttgtggaagccgtgggtgaagaagtcaccacatttgccgtcggcgaccgtgtgggtgtcggctgttttgtagactcctgcggggaatgtgaatactgtctgaacggagacgaacaatattgcacaaaaggcgttgttcaaacttataataacctggactacgacggaaaccctacgtacggcggctacagccaaaaaatagttgtcactgacagattcgttgtccggattccggatcagctggatttggatgctgccagcccgctattgtgcgcgggcattaccacctattctccgctgaaacactggaatgccggccccggcaaaaaagtggcgattgtcggaatgggcgggctcggacatttagccgttcaattcgcgcacgctttaggcgcagaggtcaccgtcctcagccgctcaatgaacaaaaaagacgaagcgcttgaatttggagccgatcattactttgcaacaagcgatccggatacatttactgagctggccggacgatttgatcttattttaaatacagtatccgcgaaccttgacgtagatgcctacttatccctgcttcgcattgacggtacattggtaaatgtgggagcgcccgctaagccggactcatacagtgtgttctccttaatcacgggccgccgcagcattgcgggttcactcgtcggcggtattccgcagactcaggagatgcttgatttcgccgccgagcacggcattgctcctaaaattgaagtgataccggccaatcaagttgacgaagcgtacgaacgggttctccaaagcgatgtccgctaccgtttcgtcattgatatttcaactttataatcgacataaaaaaacataccaatatttgttggtatgtttttttcagttcaaattattttttatttcagcagccatccgggcaccgcttttatataaaccaattcgcctatcaattcaacaatcgtctgtgtgacgataacagcggcggctaatgaggcccaagcatccggcagagccagcgctaacggaaggactgcgagagaatttcttgtgcccgtgctgaagatcaatgctcttccttcacctgtatccagacggaacgcatatgcaataaaccgggagacaaacggcataatgagcaggaataacagatagatcggaatcacacgtataatgatgccagcatcactgatgacctttccgatttgtgtggcgacgaccgccagtaagaccagagccataaaaggaacaggcagccacgccgtccactccaacaccttttctcccgccggcttcttatcagcccacaattgtgtcatcactgccgccagcagcggtcccgctattaaacataagaatgcttccagaaacggccccgcatgaacagcccctatcacttctttcccgataaacagccacaagtataacggaagcaataccatctgaacggcgaacaaaactggcgtggaagccagtattaatctctcatttcctttgccgagctgagtaaagacgatgacgtaatcaatacaaggtgtaagcaataccaaacaaacccctgataatataggaggagattgaggaaaaatggcggttaacacccatacaacgaaaggtacagctaagaaattaccgatcaataaagccgccataaacttgaggtttgacaaggcttccctcagcttcaagaatgggatttgggcaaacatggcatacatgagaacagcgataagcggtgatatcgtccatccccagctgagtcctgaatctttcccggcgatccccgctattccgccgattacaagagtcacaccatatatccaaatttgctgtttttctaatgtctctctggttattttcattggctgacacctcttccccgcccattataccttcttttctgctgctcttgcattatggttctgccggaattaaaaaacaccaagggtctgtgacacttggtgtttttggaacgcggccgagaaaaacgggttgaaaaccgttaatccttgtaaataacccccaaaaagtatttttgacatactgttccttatcgaataaaagcattctctttcatttccaaagcatcatccagccatctcgggtgcatcggcaagagatgttcaggtaattcatggatatcaaaatatctgatttccatggcttcctcagtggactttttcaaagtaccgccgatgacgtcacattgaaaacaattggtaataaaatggctgactctgccgtcagggtatataaaggtttgtgaactcggatcagaatagacgcctatcattttagagactttcaccactaatccagtttcctcttctatttctcttataattgcttgttcaactgtttcaccaggttccacatgtcctgaaggaatgccccataaaccattatcagcacgcttcattaataaaacggaacttgattctttaatcataattccagcgactccggctttcacttgttctgtccattggaaatccggttttttacgtacttctgcctttatttcattatcgaacaagtctttcagatcgcggatcacaacatccggatttctaaaatcatgttttgcaggaaataaagtattttgttcagaaactaatacggaagttatgcctatttggtttgctccgacaatatctgtttcaggcgtatccccaatcataacgcatctctctttatcttcaaaagactcgagtactttttcaaatattgaagacgccggttttccaattataatcggctctttagcagctgctgttttaacagccgcgactatagcgcctgtcgcgggagctggtccgttagcggcaggaaatgttttatccccgtttgcagcgataaatgaagccccgcagcggatgaggtttactgccttatgcacatcctgaaatgtaatattttgatcccatccaatgacgacagcctccgcctgatcttccgtaagatcaataccggccttttgaatttcacttttaagttggtcatttcccaatatatatgccttctttattccttcactgacaaggtaatcagctgttgcccaccccgcagtaaacacttcatcaatacttgctgaaatccccagtttatgaaggcgtttcacaatcgtttctcttgtaacacaaggatcattcgttaaaaagcgaatggctttcttttcttcacggagtcgttttaaagaggccacagctcctggtaaagctttatctcctatatatatcactccgtctaaatcaaataaaaatacatcataattcttggagatcatcataacactccttaagcggttgtctcttggttaatagttgagcgatacgcaaaatgatttgtagggccttgtcctttcccgattcctaagggatgtttaatggctgctgaaatgaattcctttccagttgccactgattccggtatgctgtgctgctttgccagctctgcagttatcacagctgaaaacgtacagcctgttccatgagtatgctttgtatcaaagcggggagaaacaaattcctcgaagtcctcgtcaaagtacaaaatatcacgggcttctccgttcaggtgccccccttttacgacagcactttttgccccgtatacctccactatttctttcgccgcatcacgcatctgctgtacagtctcgattgattttccgatgattacttccgcttccggaatgttcggtgtaataacagttgtttggggtattaataatttcttcaaataatcaatggcgtccttatggagcagatgatgtccgcttttagcaatcataaccggatccatcacatacgattgaatatttgcgtcttttaacttttctgccagcaattcaataattcctatacttgcaagcataccggttttgacagcatccggttttatatcatccatgacacagtctatttgctgagatatattctgaagagacatctcctcaaaacttttcacaccaagtgtattttgtgcaacaactgatgtaataactgccattccatataccttttgttcctgaaatgtttttaaatccgcgtgaattcccgcccctccggaaggatcagtcccagcaatcgaaagcgctttataaatatccgtcaacttacactcctccttcaggcaggtttcactgctttaaaaatgacaaaaggcggatattccttttcacatttccaattattaaattgaaactctttctctatggcttttacatgctcttggtcaatatcgtttaacgttggttctgataaagttacattttcaaaacctgcatgagttaatagtttataatacattgacttcggccaatgaaaatcatttaaaattaaatctgcttgtccgggaacatggagccattcatttctttcttctccgtaagaatattctttccccggtattccattgcggaaggttgaaaattcaattccggttgaatcaggattcgtatcgagtatgacaaatgaagctcctggttttaacacacgaaaaatttcatttatgatacctttgatacgctggtcactatccgtattaataaaaacataacaggccattgcagcatcaactgagtgatctggtaagaaggaaagattatcgtgttcaattaaatgatagtccacatgaggatgttgtctttttgcctttgctatatctaacatcttccttgattcatcgactgcgatcacattgcagcctattctgtcagccagcctataagctacctttcctggaccgcatccgaaatcgagcacctttttaatctccgctttatcaaaagtacgaaaaacaaactcaaaacctaacgtttgttctaaaacgtcattataagcatcgaatttaccagcaacactgtcttctttccatgaagttttcattgaatttcctccttttgctcagttgagaaataatgaaaccacttattcctgacgaaaaattgatatataggaagtaaactttgaaatagagaatgatccatatcacgtttatatgcaatatgctggtatatactgaaaaggaaaagaatctgtttccagtaatcaggtaaatcaagcatttcaatatcgttttttgtcatagaaatttgatctttcctaagtaattcttcgtactttaagactgtttcaatggacggccagttatttccctcaggcattttcggaaattcaaattccggaatatcatggtgattttcagcttcttcaagcaccgttttcgcccattcatgatctgaatcataaatatggattgatcccgcattatgaaaatattctccgacttctacacgcagttctctggccattaattcctgcatgaaggtaaatgagaaaagatcactgatcatcccgcgaaaagcatcatttgcacgcatgacagaagacatgtataattcgccttccctcacaaaaaactgcaaaccgattgtgcaggaaacatctatattttctaaaacgaagagttccgaagcatcgaatatttgaataaatgccctttttgaatcaatatcttcttgtgtcaaaagattttttattctattccattgatttagttttgcatttccgaattcaaatattttaggcccgtacgcagtgcctgttaatgtttttttattcattgagtatgaaggcatttttttattgtaataactgataaaatctaagtcgttactccccgataaataccatagcacttcagcaaaattaaacacgatattagtttttcttgaggataaataagtgacacgttctattggattttccagagtcagatggtagttcaattgttctctgcttttttgtccgcgcggtgaattgaaaaattcagggttgtgatagatgtcatacagcgtttccgtatatgcttcatgaaaagttctctttctcattgagattccgccttatatgctgcaaaggtatttttaatgttctctaataaatcatctgtatctttatagctgatgtactcaacatccgccactgcatgtaacccttgaattaagaaagcataatccttgtccttttctagaaatagcacgatcttttttttcaaggcggaagcccatccaatttctatatgtgttccaggagaagcgggtgatccgggaaatgctgcaaaaaggtcgcaagtacttatttcatcaaaatcaattttagtgcattgaaggggtgtcatgaaatctttcccccacccttcccgcttgtgagcattatgaaccagccatccttcattctcaaaaaaggaaattaatgattccagctttcccctctcatacgcactcatcaatccagttttctcatctactaaacttttaaaaggccctgccagaaaaacttttttagtcgccacttcatatcaccctttcaaaataaataaagccactttcctctatggaaagtggcttaaatatagataagataaagaatctctctaatttttcacttccctacgctggtattaaccaaatcaggttcaaagggtcaggacgtattgtctcttctcagctattaaagctcccctagtgactttttataaatatttactttaattctatgctattccatataaatagtcaaacaatgactttcccttcaatattgcagcttacccactagttttaaaaccttccggcctcttttttcctgccaacgaataaggtcacggcaacactcgctgaactgaccaaagtccccagaacggcagcaagaattgtcaaaaagccattgggaatcagaaatccaatcggaatgagccccgcaaacgtgaggacgataaaacattgatagactccggatatgattcttacaaccaagctgccaaaaaaggacatgacgaatggcggaatgaacaaacataagatgattccgagtgagatcaataaaatcataggctcgtcaaaagaaatgacacgatcgccgggagactcttcagcagccgcgaatacagcaaatatagacatcatcagcgtaagaaaaacaagaaaaaaccttttcagcaacgggactgaccccataagatgagacaaataaaaacaccttcaagtttgaatacggatgattgttatccgaaattagacttggaggtgttttttctatggggacaagagtgagttatccggttgaagcgaaacagaaggctgtagaaatgagattggcaggcgtacctatgaaagagatcatgcaggagttgaatattaagaataagacacaggttcagacatgggttagatggtataaggctggtgatacacatcgattcgaacagcctgttggaaagcaatacacttacggaaaaggtccggagtattcttccgatttagagaaactgcaggcagagattcgttacctgagacaacagaatgaagttttaaaaaagtacaacgaattggaaaggaagttgatagcgaaacgtcagtcgaacttgtagaaatattgcacagcacaatgaccgtacaggatatctgtattcatttaggtatctctcgagcgtcttattatcgttggaagaagaatctgatgaaggatcatcccaagcgccatttggaaaaacaaatcggcacgttgtgccgagagcacaagtatcgatatggatatcgaaaaatcacagccatactaaaaaagagaatgtgtattaaccataaaacggttcaacgtattatgcagaaaaatcaatggcagtgtcgggttaaggtgaaaaagcgcaagaaggatgggcagccatatgccgtggtcgataatatattggatcggaactttcagtctgatcgtcctcttgaaaaactagtaacggacatcacatatttgccttatggacagaaacaattgtacctttccagtatattagatttatacaatggagaagtgattgcttttactattggggataagcaggacacagcctttgtcttagacacacttgatcagctaccaatgctgcctgagaactgcgtgttacatagtgaccaaggttctgtgtatacatcttacgagtatcaaaaagctgttaaaacaaaaggcattaccatgagcatgtcccgcaaagggacgcccgctgataatgcctccatcgaatcgtttcattcctcgctaaagtctgaaacgttctatcttaacagcattgatcgaactacgactgccatcgtagaacgcactgtcatagaatacattcattattataacaatattcgtattcaaaccaaactaaacaaccaatcaccgataaactatcggcaattggctgtttaaaaggtgttttgacccctgtctcaaaaacggggggcagtccccaacgttatgactcctttttttataaaaacgggtatctttttttcaatcaagataaccattttatgttatcaaatgaaataatatgaagtcaaaccgagttctgcacctgatttattggttcttatttttttgataatttccatataattgtccgcaagcagcatctatatcaatgccaaattgacttctgacggtcacgttaattcctgctgactttaattttttatagaagtttacaacttgtttctcatttacttcttcaaatctcataggtgaactaacagtcgggttatatctaatgatgtttacatggaacaagttccctctcttatatctgcttcttaaaagatttactacttcattcgcatgatcaatagaatcattaactcccggcagcataatataagcaatataaacttttcttgaggtcacacgtatatgctcatctaatgtgtccattacctccaataacgggtagcgttcattaatcggcattaacttgcttcgctgttcattaaaaggagaatgtaatgaaaacgtcaggttgacctgcggataatcctgagtgatttttttaatgcccggaataatacctatggtcgaaatagataacctgcgagggcttaaagcaaacaacttcggatttgtaagcacatgtaaagcatcaaaaacttgtacattcgctaatgcttctcccattcccataaaagaaatactgtcaattgaatgtccttttaagtgaaagtacaaaatttggtcagtcatttcatctgacgttaaattgcgttttaaaccaatatctcctgttgcacaaaatttacagccaaaatgacagccgcactgcgaggatatacaaaatgactcccaaccggctttatatttcatattaaccgtttctattttttcgtctcctgaaatttcaaataagacttttgtaacttgctcagaatgctgcacttttaaaggagcaatatttaaaattgactctccgaactcctctattaacaattttctcaaggatttaggaagaaccgttatttcattgaaatgatttattctcccttggaatacagcatttttgatttgattcattctaaaatcaggaaatttattttgcttcaggaactcttgaattcttatatacttgtttttttgttgcatgttttctcatccttccataatactcttgtttgtttgagtaaatagaagggagtgatcatctaacctttttttaaaatcaggcacaaaaaaacaccgacacaattatcggtgttacgcttaaataacatcatgcacaaataaacaaggacattatgtcattggattatcgtttatttgacatagagaaaaagcaccgataactgtttttgtatggtgatttggcttaaaaaaggacagactgctccctttgtccgccaaaatgtttccaatttttgcatttttaccatacaaaattccataaatcgttatcatcgctttcacctctttcttgtcaatattagcaataatcaccatatcataaggtttcccttatgtaaagctaaacaaatgcttacgcccccgctaatgacagtattatataacttgcttattaagcctaatccaagtacagaaagcgcgctgatcacatttttcacttatccgcgacggaacatttcttatataatgggtgaccggcagctgcctgcttgaatcccaatcttcctatagtgattttttatattcatgacagtatgatgatttgtcacttcagcaatcagatcgtttattcgatccagattaatcggtttattttctgataagctgctgaagctttctctgatttcttcaggatagacatttccggccatgcttgacaggccgttacacccgttactcagcatcttcggaaattcaacgtcccctgccgcaaacaaaataaagtgatcagggaactctgtttgtttatgacgcagaacgtctcctccttctttcagcccccttatcccgggatgccggcttattaagtctttaagcgctttctcactcagattaaaaccggtccggccggggttattataaagcacagcctctttagaggtatgactgagaagttcgtcaacgtaataaacggcttgctgctgtgtcggtcttatataaggaggaaaaccaatcagtacagaatcaatattggttttctcgatgtgtttcatcagtttgacggcatcactggttcttacggctgaaacaccgaacatcagttcaacatcttcaaattttcgctgattaacatactcaatgatctgaagacgctcatctatgctgagtgaatgctgttcaccagtcgtgccgcatatgagtaacgaatggataccgctgtttttcaaatgttcgacaatagcatcaaatccttctacatataaactttcatcttcatgaaaaggcgtagggatagcaacattaaaatttcgcatgagaatgtcctccaagtacatattcttgaatatctgcagagtatcatataacactgtctgacatttaaaaaggtacagtttcagacaactcaacatgtcagatgtaaaggctgacacacaaaaaaagcaggcaaagagagcctgcttcattgcttcggccataattgttttatccaattggttttggaaggctaaaatattcagactcatcaacatttgatggattcatttaggcacatgcccttatcaaaaacaatctgggtgcatatcctgctcctaaaagtcattcataaagggagtttagatatgtattattattattatccgtattatgtatatgattacagacagcagcctgatttaagccaggcaaatcataaaatgcgaagccatttatctgcgattcaacaaattccaatacactcatcctcctttcaacaatcaatggctgcggtagtgaaacacttgcaggctgtcagcagagcactcgctctgggatgcggtatgagttcagaattcagatttcttccagacacttggggattacgagaacttcatactgtacacgcgaaatatcttactccgttgagctatcacgtttattccgctttaggcgcagcagagcttctcgccgccggacaaggccgggctcctcattttcctcttatggttggctgcatgaattcaatacttcgtctatggtcaaacttccccgcagcgatagcagacctgagaagagcagccggtcaccaatacgcgtcatctgtagacgaggcggaaaatctcctaagaccaatggttccagccacacaacaggcattatccatcagtcaatctgcagtgagtccggctatttggcaggcttccttacgtgccgcgcagttagctcgggaagtacgtcagaatgttgcacaatcaatgagtcagggatcttcttattaattaagccaaaagattttttcggctttacacagtcacataaccggacttattcaacacaaaaaaagagcagtaaacacgtaagttactgctctcctctgtctatccgccgttcatttgttttacaatgtattcagcatcatttcctacaccttgaagcagcgctgaacctcgcctatgctgccaaggcaaaccaataaaatacaatccttccacagctgaaacaccccggtgatgtataattcggccttccttatccaaaacaccttctattttcatccaacaaagcggattcttaaaaccagttgcccaaatgatattgtttacttctaatgaagatgaatctttaaaaatcatttcattttgctttccggctatgactctttgttttaagatgatcttcttctgtcttattgcatgttttaattcatacccaaatatggggtcgcctttcttctgaatgaacttgcctaatattgatgtatgacttgcatgtaaaactcctaatttatcaaaccaccaaaagatgcttctttttccaatccataaagggaaataaaccggtttattactgcaagccaaatatgtaactctttctttggataattcaacagctatctgagccccgctattcccgccgccgactaccagtacattcccaggcgccagttgttttgaatgtttatattgtgaagaatgtaattgatgaatatgatcggctacatcccttgatattgatggaatattaggggtatgaaaaggacctgcggccatcacaagattcttcgtttgatattcttcccggtttgtttttattaagaaatagttctttaatttttggacacttattacttctgtccgtaattggatcgggatttcaaatctttcaacatattttttcagataagcagcaatttcattttttgaagggagtccatgcttgtctccttcaagctgcattccaggcaaagagctgtacattcgagaagtaaataaaaccaatgagtcataccggttgttccagctttctcccacttcatgacttttatccaaaatgataaacttttgtttcgacttctttagataatatcctactgagattcctgcctgaccggctccgattactatcgtgtcgtacatatgaatccccccctccggttttatcttaattgtcagcagacaaagtgagtccctatttccttctttaatgatgatgatggtcacgcggattctcagtttgggcctgacaaagaatcgtattgtcgtgattatgcgctgctgtttccatttgaatggttacatgtgtaatgccttatctccaagttcatgttcaattttgcgtaaaatactttcactttcagaaatggtcagttgatcgttaacaactgcgtggcaggaaagagcattcaatccgcttgtgatagaccatatgtgcaaatcatgaatgctttgaattccttctgtctcttcaattgtatgaatgatgtcagtgacatcgatatttcccggagttccttccattaatacgtgaatggagtctttcgtcacatggtaaccgcttctcagaacaagaatagccacaatgacactggccactggatctgcccagctccacccgaagaagatgataaggatcgcagccagtatggcacctacagatccgagcatgtcacttatcacatgtaagtaagcccctcttatgttcaggttattctttgtatctccgccgttcagcataatccaagcgaccaatatatttacagctaacccgatgatactaatcgtcagcataccggttgttgctacctccggcggatgagagaaacgtttgattgcttcataaatgatataaagggaaatcaatattaatgcaacaccgtttatcacagctgcgagaatctcaaatcgtttgtagccgaatgtcttatgatgacttgcctttttttcggccaatttaaaagcaatcagagcaaccattaatgagatcgagtcactcagcatatggcctgcatctgacaaaagcgctaaactattggttaaaaatccgcctatcgcttctattatcatataacctgtaatcatgataaaagagatcaataaaaccttcttattggatccgccagcgtgattgtgattgtgacccataaaaatctcctccttatctcatacactgcatttattatttcttttctgttatgaagcattctaacatggacaaaaaaataaccttatatgattatgtgctcatatatgaatatataggttctttactgaaatgtcaaaatcttttcaatgaaaatgtccaatactttatattgctcttgatcaatgattgctatgaagccgcggattacagtaattactttaggcgcagacaatttagaaaaatcgcttcacttctatcgagatggcttgggtctgcctacagagggaatagtcggtacagaatttgaacatggcgcagttgccttttttgacttacaaacaggactgaaacttgccatttggaaccgcaaagacatcgcacatgaaacaaacgttacgttaactgcgccaagccctgcagaatttacatgaggacataatgttggcagtaaagctgaagccgataaagtcatggaacaggcaaaacaggcaggagcaacgataactgatcccgctcatgatactttttggggcggatactccggtcacttccaagaccccgatggacacttatgggaaatcgtttggaatccgcactgggatataagtgaataaccacatttcagaaatgaaaacatcaataaaaacacacctaaatgttctggtgtgctccaataatgatgtttagaatgcaaacgcagcattttatttgtttcccaaaacgatcaaactatttatacgatggcgggatgctttgcggaaaacggaatacattttcgggatcgtatttcgcctttattctttgaagccttgcaaagtttgagccataatatgcttttccgaagttctcgatattttgatccggaacattcacatatgaacctgttacatatggtttcatcagctgacgcactctttcaactgatgcaagattcgaagcttcttgtgatttatttttccaactggccgtccattccgtataaaacaacggacggcgccaatagaaggctgtttcactgcttggtactctgcttatcgcgccgccccaattgataaaaaagaaattggtttctgtcccagtcgctttttctaaaaattgtctcattactgcaataggttcttccggccaaagattgagcgcccacgccgaggagaatttaacactctgatcagatctgccgggaatcggttcgtcaggatctaagaaatctatacaatccgggtagtatagtgttttgattactgtttgtgccggcgttccggcatttaataaaggttttaataattgaaccagctctggttttgaaccgaggaacaatccttccacatggcacaagccatttactttgctgtaaatctcaaggtagcatcctaatcgttcgtctgtaaacggcgcccatttttgccacgctttaaataccgtttctaactgttcccacggccaaatgatattaaagacggttgcggttttaggggcacggtgaactttgaatgtatattgggtgttatatccgaaattgcctcccccgccgcctctggaagcccacagtaaatcttcattgcgggattgatttgcttgaataatcctgcctttggcatctaccattttcagtgcgagaaggttatcgcttatcaggccgatcgatcgggaaagcactccaaatccgcctcccattgtgattcctccgattccgacggttggactgtctccgaacggggccataaaaccttcccgagctaaaccttttacaagcgggccgacgtgaatgccggtttgaacggttgctaccgcgtttttttcatctaagaaaactttattcatgtcactcacatcaataacaattccatcacttaccgtggaaagatttttatccagagcatggcggccgcttctgacacgcataggcacattcttctcacgagcccatttaatagcattacttatatcgtatgaattttgtgcaaaaacaaagacaagcggacagacatcaacataagggttccaattcttaaccgcctgtgtatagccggggtcccctttgaagatgacgcgtcctgttaactgtgctgatcccatctatttcactcccaataagcatttgattccgataccagtatatgtaggaattggacaaattcttagacagatgttctgcaaacttaaaaatagatacatatacgcgaagatgatataaaaacaaaaaaaaagacaagagcggcaagctgccgaaactcttgtctctcctgccttttttatcatgataggcacttacatttattggcgtgatatcccgaccaaactatggaagtccatagaaaattatgtttgccctgccatgcgtggttctgctgagacaccggctgagcaatctttctgcttgatcccccgacaaagaatcttattctttatcgtttttgcacccctgtacggttaaaatcaatacacattgaatcttatcttttacatgatgaaaagatcttattttttcttcttgtgcttacgtttgcaatcctgttttttctctttcttatgacgttttttacatttcgctttggctgctaattttgccgcttctacctttgcttctgctgctgcttttgctgcttctgctgctctggctcttgcttcttccgctcttgctattgcctcttccgctctggctctcgcttctgcttctcttgctgcttccgctcttgctgcgtcgtccgccatatcaaaatcatggccaaggtcacaggcttcgttgtatggctttttcttctgaacgtactgttgatcttcaccttcgttataatacattacgccactccttctctcatcttttaatctttacatactatgtaaagaaataactgcagcttggactggtattttgatgaaccggcacattttaggataattttcatttatcgatacaacagattctggatacttgatgaaacttaaatgtttatgataagcagcgtaaaaagggagactacgaaaaaaccaagggttaaacccttggtttttttgtgaaaatgataaaaaggatgctgcgcgctgcagcatccttctgtaccaactttttgttgaacgattggaaagtgttttttggcttttagtttgcttgctgtgtttgttttactggttctttgctaaaaagtccgacaatgttccacaagataattgcagcagctatgattacacgagtcgtactgacttcttggttagtaaacaatttatagccatatattgaccccaatgctgctatacaaaaaatattgaaccatttactccaacgcaattagaaaactccttataaaatgattacatttcaaaacaatgtattataatattaacaaaatttttcaataatttaccttaaatcattcttaattggttttcctgatcattttctctaatcgtcttcgatctttcggatttttgatcatttttttgttacaggctagacccagacatcattttcagctgtttgatcagttatttcctgcccggtattcacaacacctttaggttctacaagcaaaatgttacactctgattctgcataaggtttatgttcaacatttttcggaatgacaaacatttcaccttcatttaatgttacttctccatcacgaaattcaatgattaaattaccctcaatgacaatgaagacttcatctgtttcgtcatgcttatgccaaacaaaatccccttgtaccttaacaagtttaaattgatagtcattcatttcagcgattacttttggagaccattgatcttggaacgcagctaatttctcttgaaaattaatcggtttatattccattctttccgctttccttgtaaaactctatcatttaactagtcccaaattaaaggcctgtccacttcagcagttctgagatagtctaaaagctgaccggtatgtacggactcatggtaagcgattcttaataacatgtctcctagttcgcgaatatatccaacatcagacctgtcaatctttatatttgttaaatctgtttcgtttaacgatttgatgaatgtcaaaaactcggcccgatacggttttgcaaattctaattcttcgcttacagtggtaaacatttttgattcataaggattaatagtttcctctgaaaactcactcatatttttcattaaaatttgatgataaagaaattctgcttctaatacatgtcttatcatttccttacacgacatggcttcggaatccgggcgccagtccattttttcctcaggtatagctgcccataacttgatgcttcgccgtcttacctcttcaaaatgtaaaataataaggtcaattgtattcaagtgttttcccccttttatttttataacctattctccttctttccaggaataccttcatgagctgcctcaaaaaattaaagatatattcctttcgcctctaaataaatagtcccatccacatcattgacagacgcggtgttaaaaatggtgagaaacaactcgctagattgataaatcgaacaattttaagataaagagatattcattcatccatacaatagactctggctgaacatatactgaatgatagttttcatcagaaaggagaaatcagctttggcaaaatatcggatcatgacctttgacgggggcggaaccttaggtgctttaagtttacagctattgaacagactggctgaagaaaatccagaattaataagtcgaacccacgtatttgcgggaaattcaatcggttcatttactgcccttgcattagcaagcggaagatctccgagggaaacacttcagtattttgaggatgaaatcctgcccgcattcagcacttcccggccgggcggacctgttttcaatcaacaattaccatattccggttttattaaagcggtacgaaactttttcccgccaggccttcgccttaaagatctaagaaaacgaattgttgtcccttcattcaaattatactccccggcactggatcgttggacgcccgtattatttcacaactttcccggctctccctatttaaatgagaaagtgagtgatgtcatactgcggagcagcggtgctcccgcgacgcagcgcgcctatcaaaactacgtggacggatatgtagtggcaacgaaccccagtacggccagtatcgcgtttgcggttggtaaagccaacgtgccattggatcaaattgcggcgctatccatcggtacaggtgaagccccgactcggttaagaagagatacgaggggatggggaatggtgagtgcggataacatacgtcccgaaaacctgaagaaccttcctccaaattggggagtccttttggacaggtcgcctaatgaacctttactgccatttcttcagatgatctccggcggaaatggctactatgaatccatggtcagcgcgaatctgctgggagatcgctttttccggttagatccgcggattcctaacttctccaaaacagacccttccgtggttcccgctgtcattgaaattgcgaacaaaaccaacttacagcctgtgaatacatttatagagaaaaactggaacgacagccattaactaagttagaagtttataataattcaatgaacaaaaaataccaagggactcaaaacccttggtattattaatgcggccgagagggtttggaccttcacggggtatttatacgctgggcattcgataaagtgaaatcttattaccgcccggcatttcaaacactgaagttaagcattacaaccaacaatcgggccatttaattgaataggactactcagaagtcgcttccattacgtaagaaaagcgactttttagatttgattttcaagttcctttgacaaattttgaaaagaccattgactattcagttgaactgtattaagtttaactatatagtcagactgaatagaggatgaggatatgaaacataaattattaccgctgtctgaaaccatgcattatattttattagctctgcgggagccgcttcatggctatgctgccatgcagaagatcgaaaagatgagtaacggaactgttattttagcagccggcacattatacggcgcgattgaaaacttgaataagcatggctggattgaacctgttggagaatcgggccggagaaaagtttatatgataactgcggaaggaagcgccattttgaaaatggaacaaaacagattacttcatattttatccctgcacgaaggaagtgaatcgaatgaagaaatgtaagatgttttttgatattgaaaaagaggagcaatggctgaacgagcacctacaaaaaggctatcactgtacaaatatcagcggattaggaatatacactttcgaaaaaaccgacaaaaaatatgtaatgcgactggattatcaagattatttatcaaagaaaaagttcaaagactacaaagagatctatgaagacttcggctggagttatataaacagcccatggcttagcggaactcgatattggcaaaaagaagatgatgatcaaaatgaaatcttctcggatcgccaatcaaagagtaattattataaaagactaatgagtttttcatcttgttttgggttactgtgcttgttttattcttatttgatttacaaggattcaggtttgtatttaactgaaggtctgtggagtatggaaagcgcaatgttttggaaagcatttttatttgaaactccatttgcccttttgaggtcgcttcccgcccttatggctgttctatttggctgcagtttctataaagcgtatcgaaagtattcaatgttaaaagaacaataacgcgggggaagttacattcaaagaagtaatcgaggatcatgtatttgccgaatccgggcgctttaacggaaaaaaagcgccctgaatttgctgataaatcagacggcttattttgttaataatacatacttatttacaatggcttgagcgagacaagctgatgaatcaacaaaggtaagtccgcttcttttttgatccgtgaccgtatttaaatccgtacatgcaatgataaccgtatcaaccttttctgctaattcacggtgtaattcatcatataatgtactagccttatcgatttgaccttgtttaatcttttctattatgtgatcgacatagatttgccaactatcttgatgtaaaaaatcataaccttctctgtttaacgcttcttgaaatattccagattgaaccgtaggaacggtggctaaaagagctgctttttttgagcctttaggtatttttttatggtttcatcaaccatgtttagtaaagggactgaaatcgatttttttatttgattaaaatagatatgtgcggtattacatgggatggcaataaaatcaacacccgttttttcaagctttacagccccctcaataattgccttttccatgtccgtatgattgagaggtttattcatgtagaaaggtgtcggacaggaataatcatcatatgaggaaaatccatgtcatgtattgctccatatattttttggcactcgtctactaccttatctacaaatggcccagtagattttggccccattccagccagtattccaatcataattgtcctcctctgtaaaaatgtgtacgaatacgatcacgatgagttattcttgtgtttctcatctgaatctgctctcatttctttttggctgtcttctcctattttatcatttcattaatcgaattatcatatctaattccgccgcacgcagaagaatggcagatacactaaggttatgaaagcttgttttcattacactctctatcctccactttcatcatttctatatgttttcatgaattatggttaaaaatcggtgattaaattgtgcccatatagattagtaaagtgtcattgatgtcaaggcatgaactcctaaaggagatttaataactcattttcaacgaaaaactgatctctgttaattagtcgagattccaagatatacacggaccaattgaattgatctttccttttttgggaatcccacaggttccctcttgttttgatgttgttttttaaaaaaagttattgacaccaataaatgaccatgttatcattaaaaatttgatatctcactccatatatgataaccttaagttaagttcccatatatggaggtggattatatgtttcaaattggcgataacattgtttatccaatgcacggagcaggtacaattgaagccatagaagaaaaacaattcttagaggaaaaacaacagtattatgtcataagaatgtcaatcagtaatatgacagttatgattccaacgcgtaaaatattgagttcaaatatacggccagttactgatatacgtgcattaaaacacattatacacatttttcagcatggagaatcagataagttactgccgtggaagcaaaggtatgtagtaaacacgaacaaaataaaaacgggtgaaatacaagaaggcgttgaagttgtacgtgatttaatgcgaatgaagaaagaaaaagcacttaattcaagcgaaaaaaaaatgttggataatgcatatgaatttttgattagtgaactggaagtcattaaaggaatcactgaaaaacaaataaaaagtttctgctaaggttaattttaaataatgttttgcattccaaaaagcacccgcgagttttcggaatattacgattaaaatatttcaaagacgcttaacttcttcaacttacttttagaacattaacctcttttattattcctacaatctaatctgtttttattattaaaaatttcttcaacgaacatttgatgttttatcaaaaaactcgatgaaatagtcacttgatttttgtaatcctgattcacactggcacggacaaggagccgtaaggatggaagagaggcagggctttcattgttttaggtctaagtgattatttccagaagaaaaaacaaccactcccctctttatctttaaaatttcttacatctgcttccacagtgaatagcagttggttatcttcttttcataaaagagatatgcgaattgtaacaaagaataacatacagttatcttgagaacataaaaacaaatcatttatatatattccacatatcgtcaatccggtatgttatactgtaaacaatcctttgaggttttaaacctttttcttaccttgtagcaactgtccctactcgaacgttgagtagggtttttttattcactatgatacagagaacataaaaaaacaggccctatataaagagcctgtttgtataaacgattgaagattaagcagttttttgaacgttagcagcttgagctccgcgagcaccttgctcaacgtcaaacgttactttttgaccttcgtctaaagatttgaatccgtcactttggattgcagaaaagtgtacgaatacatcgtctccattttcacgttcgataaatccaaaacctttttctgcattaaaccatttaactgtaccttgttccatttttgttgcctcctagtgtgttacacattgtattactatccttgcccaaagtatcatcaagacgaaaagtcgatattcatactatcctttacacgaacaaaaataattctcctttatcatatcacgaaacggaaataactgcaaattaataatgtgttcattcatgttttatttgttaaacctgtcgataccagtgcaaaataagatgcctattaatagctatggtttgaaaacaccgtgaaaatgaatcacgagtgccttcaaacccagtacttcatattgattgttaaagatttctttaaaaagctcagctgtttcttgttcaagtacaagatattcttggctgttcactggtacagctttgtttctgcagatgtttccaaacgatcactcaggtatacccctattttaacggtattaacttgtcatgtttgttcctcaaacaatcaaaatttacggtctaaataaaccgattcacattggggagcatggagagagtttggcccgataaagagccgggtataatcttcatacgctttttgtatcccggctggccattgctaataaagatttaatcgagatggaaacaagtatctcatttccaataatttcacagacgaatgggaaagatacttatcatctatggtgtatgacgctgtgacttcaaagacaaacgttttcgatacttagaagaacatcagggaaggggaaatctttaaaaaatgaatgaacaaaacctaaggactttgagaaaactggttacaccctatgaaaagtccgatttacaaaaaagtatatgtcaaatcattaacacattggtgccatttttcctgctatggtatttggcatataagagcttgtccatttcttatttccttacattagccatttctgtcgttgcagcaggttttttagtaagaaccttcatcatctttcatgattgctgccactattccttttttaagaaccgaaaggcgaatcgaatccttggaacaattactggaattctgactctgcatccgtttgatcattgggcacacgatcattctgtccatcatgcgacaagcagcaacctggacaaacgcggtacgggcgatatttgggtactgactgttgaggaatataaggaagcctcaactaagacaaaaataatgtaccgtttgtacagaaatccgtttgttatgtttattatcggaccgatttacgtcttcgggattaccaatcgttttaatcgtaaaggggcaaaacgcaaagaacggatgaatacatatgtaacgaacctggggatcgtcgctttggcagcacttttatgttgggctatcggctggcaaaactttctgctggtccagacaccaatttttatgatatcgggatccctcggaatttggatgttttatattcagcatacgtttgaggattcatatttcgaagaagatgagcattgggaatatgtaaaagcagccgttgaaggaagctctttttataagcttccaaaagtcatgcaatggttaacaggcaatatcggtttccatcatgttcatcatttaagcccaagagtcccaaactataagcttgaaatcgtgcataacaacactgaaccattgcaaaacgttccgaccatcacactggcaacaagtattaagtcgttaaagttccgcctatgggatgaagaaggcaaaaaatttgttggttttacccactttaaaaaaacttctaaaagccaggtatcagctcggctaagaacggattaaataaacgcccataatcaatgataatgggcagtgtatcttgcataataaaagtgcagactcgcgcaaagattttgtgcagaggtcagcacttttttaatgccacatgcacttacaacaaaaaaataccaaaggtgtcaaaacccttggtatcattgagatgcgcccgagaggacttgaacccacgggttattcacccgctgggccctcaataaagtgattctttattatgaattacaaaagcctataatatcagcatttgtttattttgattatgaatgtttacttcgatttatttttatttgggagtaaaaatggagtaggttttcatttcaagacagttaatgtcttgttactggtgacatgtctattagagtaaccgcctaattgaaatggctagttctccatgttttataatgaactctggcttgatgaagtttttctatgatttgttctagctttttatctttccatttcttaatcagcagaactcgcggtttgtaacaccttaatattgcctttcaaaatcctttgcataaacgatcttaactttttgactgttttctttgtattccccttaaaattgaataatcactttcccttttggccgtccatttgcgactagttctagcgcttcatttacgttgtctatggtaaattgtattggatgaattgctggagcaatgttgttttcttcaatgattttggtaatctctttaagttgtgcgccgtcagaacgaacgaagataaaatggtattccacgttttgtttcttggctttgcgatcatactttgcgccaacaagggaaaatagcatttgtttccacaatggaaaattccggtcttttccgaagcgtttatttggtcctgtacggagagagagcaatcttccgcccggtttgatgatactcaattcactgtcaaattctttaggtcccagtgtatcaatcacataatccacatttgacaacaagtcaacatagttttctgttgaataatccaaatattgatctgcacccatttccaaaatgcgttcgcgcgcttctgagctgccgctaacaatgacatttaggcccattgcctttgcgattggtacagccatctgaccaaagctgcctgatccacctggaatgaagacagatttacctgactgtgcctcaagttcttcatgcagaccttgatacgctgtgagtccagccagtggtgcagcagcggcttccacgtaagacaaattttttggcatgggtgcaattgcggcagcatcaattgcggcatattccgcaaaagcgccaattttttcgagggggagacgtgtatagatggcatctcctacgtgaaattctgccacattttttccgactttttcgataactcctgtcaattcattaccaagcgttaatgggaattcataatcttgaatcagtttcacgctgcctgtaataattaacatttcgagtggattgactgccgcagctttgacctttaccaagacttcattgtcatcgatttctggaattggaatgtcattgatttgggcatagagatcttttgaatacttggtgatctgagctgctttcataagtgttttcatttttttatcagcatcctctatcatattacgtttattaggtttttacctttttatataatcgtttaggtggaggggaatctttcttttagcgaagtctgacttccaattttatgattaaccctccacctaaacagcagtcatttttagaacgatcattctcaaataattaaattttatagaccgatactgtgaataaatgtttctcatcttcctagtgttattgatgtagagcatcgttatataggtttaataacttgaaatattacatctctagaatcggatagatttgatctcttaattgaaattcatagtttccgtctacaactcctactacttgattactatcataaagctccatcataaaactcgccacttgctcaactgtgtggtacatcgggatatttgctttgtaatcatattctttcgtatcagatgcagttttcatgaattctgtttccgtgattgctggcgctaaaactttcaccttcattttcgcacctttgcgttcaagttcttttgcaaggccttctgtaaatgcactgacaaagtatttagatgcagaataagtaatactgccaacagcaattgcatatccgagtgctgatgatacgttaattaactgagttccctctacatccgaataatcacgtacaaatagtgtagaaagaatcgttaaggattctacgtttacacgtagcatggtttccactttatctaaattctgatccgtgacagaagaagattcaccaagcccggcattattaatccaagtctcaatttgatattcctttaaattgtcatacagtgtgtatgcctgagctgtgacagataagtcacttgtacgaataataacatccaaatcaggattaatattctgaatggttgatttaagctcttctaatttatctaatcttctagctacaataattaagtttttgccgcgagcagcaaattccaatgctgtctcatatcctatacctgagcttgctcctgtaataactgtgtacttcatattattctctcctcgaaaacaaattttctaattagttaatccatataacaaaatagattcagtctagtgtcgacaaagtcaaatcaataatgttttctaatttttccttatcatttgtcgtttttgctaatactcgtatccctacgagtgaattatgaataaattgagaaagccctttaatgtcatggtgtttagaaatttctccttgttcttgaccatgttttagcagatcaaataataatgcttccgcatttataaaaatctctgtgattttcttagctacttcttcatctattagggataattcaacagctgcattaacagctaaacatccttttggctgatcttcttttgggtaaataaccatttcaaataattttcgtatagccagcttaaccgttaattctgttttcacttcattcttcattcttacttccattacttctacatagtgacttaaggctcgcataaataaagtatgtttgtcgccaaatgtatcatagatacttctgcggtgaacgcccatatggtccaccaagtcttgcatggatgttttttcatacccctgttcccagaaaaggtccattgcttttcttaatgcttttttttcatcaaattctttatttctagccatgttatccctccttcattcttaaataattaaagaacgatcattctcatttgagcagcaaaacagttagatctgacgtatttcaagtatatcaaatttaagaacgatcagtaaagaatttagaattaaatcatgtgttttatatgctatgcatggctactacctgaattttaacgaatatcgctcctttttatttttcatcaaatcatttctttaatgtcattgacggcaggtcataaagcatactggtgtgttttcgaaaatacccctcatttcagtaaagttccccgctggaatattcacactttggacacgaaataggaactgtagaagagtttcccggattttcaaactaaagtgtattaaacaatacggaggattacactgggtaacacagtcaaataaaaaagctctaactaatccaaaaagttgctagtcagagctttttatacatatttttttggtccaactcactaagcacctactctgtcatcagcaacttgaaaaggagctttgataatagggacattatttgttaaaaccactcctgcgatgctgcccaataaaatgactgtaaacaaagtcaggctgatcttcattaataatctcccctttttttattttttcgtcccgctttaatctcagtcgataatactcattggaacgtgataaatcccctttttcaaaaaataatcagctgctctgattgcaaaattttcaatgtctccgaacattcttagaaggaagataccattagcgatgacactaatggtaccctttgtttctactcaataacttattcagcttctccaacaactgtaaagcgttcatttatatgttttggattttcaatttcatccaatactgcaattgcatagtctgcatagctgatataactttcacctttcgaattcacaagaagatgatcttttcctgactgataaaatccagttcttttcccgtctgggtcaaataccgctgaaggactgataaatgtccagttaatatcagaagtttcctttagttcttgcaagttacgaccttgccctttagctgtcggaataaaaatctccgggaaatcaggtgtatccattacactgacagttttattttcgtctacataaagactccctgctccacctacaattacggctcttgtacccgttccttttaatgccctaattaatgcccggccagcatctacatgtgcctgttcttctcctaatggagcaccgaaggcattaactgctacatctaacttttttagatcatccgatgtaagatcaattatatttttttcaatgattgcaatcttttcctctttaagttttgcagcatctcttacaattgcagttacttcatgtcccctgcttaccgcttctttcaagataagacttccagcttttccggttgcaccaatgattccaattttcaatttaaagtcctcctaatcattcaaaattttaaatgtaaccatatcgattacatgtaataagtttagttacaccttatttatttgtcaatacttttatcatcttgttaattgagcatattagagtaaaagaacttgtaatacattcagttacaagtgtactataaagagtgtaaagtaatgagggtggtgaagaaatcatgtctattagcagccgttttgctgtaggaattcatatattggctcttattgaaataaatgaagacggaattagcacttctgaatttttagctggaagtgtaaatacaaatcccgccttaataagaaaaattatggggatgctgaaaaaagcaggtttagtaaatgttcggccaggtattgcaggagctgaattagcgaaggatttaactgaaatcaccttacttgatgtttatagagcagttaatgttgttcaagataaagaattgtttagtatacatgaaaatcccaatcctcaatgtcccgtaggccggaacattcaaagtacaattggtccaatatttgaaatcgcccaatctgccttggaaaaagctcttgggcatatcacaattgaggatgtggtaaaggatattattgaaaaagaaaaattgaccaataatttttaaatgatttcacagaaaatcttttatcagactggggataagaaaaatggctttttgatgaaaaagagcagacataaaatctactccttttgatgaaagatttagattacggtaagggatataaatatgctcatgataaaaaattaacgacaatgcagacgatgccagattctttaataggacgtgagtattactatccaacaactcaaggttcagaagctaagttcaaacaaagacttgaggaaatctcggattggtataaaagaaaccgcaaatcttagtttgaacgaatatgttctgtatataaaaataatgaggtatggagtgaattgataatgaattatggtgaaataaaagattactgcctaacctttccaaactcttatgaagaccatccttttggagatggttggactgcaattcggcacaaagggaataagaaaatatttgcacttatcttcactcgcgacgaacacttatgtgtcaaccttaaatgcgaacctaaaagggctgattttttacgtggtctttttgaagaaatcaagcccggataccatatgaacaaggagcattggaatactcttaccttagatgagggactcccagagcatcaaatccatgacatggtaaagtacagctttgaactgacaaaaccaaaaagtaaaaaggaaatataacatcgaaggatagaacgctcattataattattcacccggcgcaatgatacagaggaatatgcaaaaaaacctcaaggcagcaatttttaaattcgtatttacgagatgattttttcgttattgtgagtcctttgtttctcgacataggttgaacaaataaaaaaagagcagactcaaagtccactcaattaatttagatgattgcttatttcatccagacacctataaaaattgaaaggtgacgatgatatgccgcaaaggtcatttagcgtttaattaatactgataactcaccttcaaacactttttcctctttctgattataggtagataacaatacagtaagtatccccgtctggcttttatttggttttttatcaataaccttaacaatagtgttcagtttatcattagggtaaacaggtgctaggaattttatattattcattcctgtcccagcaataatatcgtcttcatgacacccttcttcaatccaaagcttaaaagtaatagataacgtttgtattccagaagcaataattccattaaacctgcccatttttgctttttcttcatttaaatgcatgtattgtgggtcatacacttctgcaaaattcattatattctcttttgttaattcaaaagatttagtttgaaaaacctgcccgacggtgaattcatccaacttcataaataaatctccctgaatctaaactttattattaaatctacgtagcattttaacatactggctctcacacaacaacttaacggtaaaacgattgttcccctatcaggaatgaacaagcacattgtttttgtttccttgcctttaacctctttataatcaggtgttttcttataaagaccaaggcggtcgccatcaccatcacccggcatatgtgccatttcttcataagaatccccaagcttctcataataagaataagcagtaagcttgcgagaactttcttctggctgataaaacgcaagttgaatatacttcccgtcatcatatacaagaattatggcgttatctcttttgtactcatctgaatctgctcgcatttcttttctgactttcttctcctgcttcatcacttcattaatcattatcatatttactgccgccgcacgcagtcagcagaaggatgaaggtgactgacaaatcatacgacctactataagtaagtggacagtaacagataaatttctataaacaaaaaataccaagggtgtcaaaacccttggtatcattgatgcggccgagaggacttgaacctccacgggttattcacccgctgggcccaccagctatattcataaaactattgctcagttgtcagcatgttaagtaaattacgaatttccttgttataacttttaatttcttcttcattacaaccggttttatcaaatactgcattaggtatcattgtgactttttctttaaactcattccctacagttgttaacgtaataattacacttcgttcatcctcttttgaacgctctcttataataagacctcgctcctcaagtcgttttaaaactggagttaatgttccggagtctagatataattcttcgcctaaacctttaacagatattttttccttctcccataaaacaagaagaaccaaatactgtgattagcgtacaagttctcgttttctgctttggaccccatatagaaaataaaaagccagctctccttcgggagaagaactggcataataaagcttcttgcttcttattttgctgtattgctcggaccttttaatttctcttcgttcttgcgtcaacgttttattattaggacacaaccaataaaataatgacgatcgagaatagcaacgctgcttttgcaaagcagtaagccctccagaatataaaagagctgcagtcattgctgctcggataatcccagcttattctgagtctgtatttcgagtagccggtcaattaaatggatgtttttttcattccttttctgtttgttccattttccaccacagtgaatcttttggattttcaacagcttcttgaaactcagctttagaagcaactgttgggtaagaaccttttaaagatttacctgaagtatctttaaataaggttaacacaactattaagccaattaaactaactgctaataaatagaaacccggcgccaaattgtttcttgtcacatgggttaaccaagaagcaactaaaggtgttgttccaccaaaaatagaaactgataagttgaatgtccaggataatgtacgatatctaatgtccgtatggaacaacgtaggtaaagatcctggcatagtaccttcgtatacagataatacaatacctaacattaaaagtcctataaataagaatgttatattccccatattaagaaattgaaaagagataatcgaaaatacaattcctaatactaatccaattgttataacttttttatttcctaatttatctcccaatttaccaaaagttaaagcgaacggtaccataataatcaatacaattgctgtaaccggtgtacttatattatcacttataccaaggttctcatctaaataagaaggcatataacctaacaataggtaattggttatattgaaaaatgccacaaatacgatacataaaaagatatcttttttatatgttttaatgacttctaataaacctggttgttgttcttggctttcagagatgtcattttcaaaaattggtgattcatctaaatgacttctcaaatataaaccaaataatcctattggaatacttaagaagaaaggaattctccatccccaactattcatttgaacatcagataaagtccagaaaagtactgtaactaaaacagaagctactatataaccagataatgtgccgatttctaaaccgctgcctaaccttatacgcttattatctggagaagattctgcgatatataccattgcaccagcgtactctccacccacagaaaaaccttgcagaatacgagctaagagtaataatataggggcccatacaccaatctgatcataagtaggaagcacaccaattattaaagtagataaagccatcattaaaatagtaattgttaatactattttccgaccaaatttatcacccattttaccaaaaataattccgcctacgggtctaagtaagaaggcaattgcaaatgtagcaaaagtaaatattaactttaattcatcgttttgaactggactgaaaaagtttttactaataataactgccaaataagaatataaagcaaaatcaaaccattccatcgcgtttcctatccctgtagcaaacacgcttttcttcgctttttgaatgtctacaacgttaatttttttcttgttaaacttcatttaataatatcgactccttaattatcaaatccacattatacaagcgcataaaacggtccaagcatgcagtcccagaatgtatagcgtaatgcttctctaaaagtctgggggtttctgtttcacctgatggagagctaacggcatagtggatgattggttcaactgtaccttaaaagactagactaatatccatatcagcgccgaataacattgtaaaccaggaaagaaggatgaaattcagttttttcgctggtttccttaacttatttttgccgattggactaaaaataatacaaaaagcaacaaaaagagaaacatccaacagataataccagccaaagcggttagtgatatatccttgggctgtggttggcattttctgcagactatttggagaaatgattccccttaatacagctctattgtgaatattatcacattcgaaaacaaacttttatttctccaaagtatcctaaacgtttattttagttcttccattacggcttccaatatgtttattataagatcgaggtcgttcctaagaattatttactgattctatctttattaccccacaatcaggtgaaacaaaacactataaacgtagcatacctttttaaaatctgacaagcccaacagggtgatagaaacccggctaaagcccagctagtcaatggatagaagaaatttttttgtttttcccaaggaataaccgtctgtgtttaatctagcccaattagaaagaaaaagagcaggagtaatcctgctctttcattcaaaactttaatttgtatgaagaatttcgtataccttttcgactttctttacctattaatcagtatgcagactacaacagaaataagtagcaccgggtatgaaataatggatgcatttaaacaggccaatcaccgacaattgaatttaggaaaaagcgttaaattctctcttatgatgttgttacgtattgttgacggtaaaattattgaacatagatctcatgtggatgtgcatgatattctccgtcagcttggcgttaattaacaggaaaaagttgaaatagtgagagacctggtgaatagcttggtctctttttttataattaagtcctcgctctatgcccccctgcattcagtcgatgtaactttgaaataaagtttaattaacatctatctatcacaaacccttattttcacaacacatcatttgtttcagcttccctcgcgaataccggatcaatgctcagctttaagatagtcaaccaatttctccgcactgttcttaacatcttcttttgaaaggtgaagcgtcccatattgtgtaaaggcaggaagaaaacgcattcctacatatttagcagtgacttgaaacggtctgataagctcgctgatcgtgatattatattctccgcctgcttgataatcagattcctgtgcgcctaaggagatcgctaagagcagttcttttccatgcaatttagtacctccagttccataagcccagccatgtgttaacacatcatcttcccattgtttgagtaacgcgggactgctgtaccaatacattgggaactgaaaaacgatacgcccatgatctaacaggagctgctgctctttttctacatcaatgataaaattagggtattcaccgtacaggtcatgaactgtaatgtcattctcttgctttaaacgattcatccaggttctgttgacaacagacgtttccaaattagggtgtataacgataactaatgttttcatttgaccgttatcctttcttcgcagattagttattattgcttttgtgataaagaattgattctaattttaaaataacaacttatttacacctattttatcctttttcatgaattcagggcaactaattggacaccgattacatttatagccaaaaaaaggcttagccttttaaaaaagattaagccttttcagtacccttatgcccctaccctattatctcgtgtctaatttctaatagctgatcatataacaaggcatctttgttttcctccatgcttagcaatactttctctacttttgcaaattggagtttgaggcattagtaactacctataatgatgaaaatatttgtgcgatgtctactgcagatgacttactttaggtaagcgggcagattgtgggcagtagatcatttaaaaataagcacaaaaaaataccaaggatctctctattacccttggtatcattgatacggccgagaggacttgaacctccactggttattcacccgctgggccctcaacctagtaaaaacctatcatgagttacaaaaaacttttattcaaagcatctgtttattttatttatacttattttcatcatttttcatgaattctgagcacaaactgggcacctattagagaccaaggaaatctgcatttcatcaagaaatatgcactcatcgccctgctgtaattagtttcacatcatttatttcagcttccctcgcgaataccggatcaatgctcagctttaagatagtcaaccaatttctccgcactgttcttaacatcttcttttgaaaggtgaagtgtcccatattgtgtaaaggcaggaagaaaacgcattcctatatagttagcagtgacttgaaacggtctgataagctcgctgatcgtgatattatattctccgcctgcttgataatcagattcctgtgcgcctaaggagatcgctaagagcagttcttttccatgcaatttagtacctccagttccataagcccagccatgtgttaacacatcatcttcccaccattaatttaaatctcgtaatttcatttttttcagattcccattgatacatattcttgcaatgttttaatgtcgtttactaaaattgaattgagtaagggacccatctttcaggagttccacccatcttttcgtaaaaacgctgagctcgtttattatcatgagcagttagccaaaacatatcagcatagtcattgtctttagaaaatttttcacatgctttgaagaggccattcgcagcatctgtccccctcgcatcttccaaaacgtataaatcatttagtacacttgttgtttgtgcaaatagtgtattgtaagtgaaatataatgtagcaaaaccaactagcttatcattttgttctgcaacaaattggataccttctttttgattaagaagtgtataaaaaagttggtgaactttttcaattgaaggtttcggtctctgataaaaatcaacgatatattcatacattatctcagttaattggtcaatatccttagcttcagcttttctaatattcgtagccattacaaatcctctccccttttaatatgtttttatatttatttgatttgtattaaaaagttgttgctaactttctcgcatctgatatacctttgtgaataatttctttcgcttcgtctcgattgaattcatgtccttcaacatataatactgctacatcctgtataccaatgatattaagtacatgttttaaatacgggtggctataatccattttcgcaaaaggttcatgcgagtaaaccccaccactcacctgaatgtgaatagctttttttccttttagatgaccaaccggtccattctcagtgtagtgaaatgttttccctactacaacaaaggaatcgatgaaagctttcaattttggaggaatcccccagttccacataggagatacaaatacaaatttatcagcacttgctaccctgtcagtgaaattattgagtgcgttaattttatgcttctctacttgccttaactctgaaccctcatcccgcaatttgtcccagccattaaggatatcttcatcgattattgggaattcatcttcatataaattaattgtcctaatttcatcccctatatgagattcacgataagattccagaaacgcacgtcctaccctatgaccaactgaattttcaactgattttggattagcggtaatatataaaattttcgacatattaagtctctctcctttgtgaagaaattccatattaatgaaaaatccaaggctttaattatgaagttacactcgctctgaattattaagtgactaataatttaaaaccaatacgccaagatggataagtgggcttccaaccatattctcttttcgcttttccatttgaggccccacgttttcctcgttcacttccatctataaatattggttttggtgctccgatctcgctcgcaaatagcgtgagacattcttttcccgtggttggttcatcatccacaatattaaccggtccattcggccagtttaatgcttcaactgaggcttgtgctgcatcttccacatgtaaaaatgatgtgatgctatcatcggctttaatttctccttttaatacctgccgaccaatcattccgtttttttcataccatgtacctgatccgtaaagcagcccatgccgcaggatgacatactcgggtaattcagcaactgcggattctaatgatgccactccaattacatttattttccttgaattcggcgcgttgagatctaaagggacatcttcattggcaggtattaatccgggttcataggccatagaaaggctttgagcaattatcctcttcactccaactttatgacacgcatcaacaatatttctcgtacctataattctgattctcgcgttttcttcaagattgtaacttgttaaagaggtaagctgatggacaacaacctcaggttgaattttcctaaaaacattaagaacagcatctcgatccattgcatctgcttttacaggagttacccctattcttttgaggaacgtgttcgaccgattacctcgggtcaatgcaaatacttgatggccgttttgtattaatttaggaagaagggaccgaccaattactccagtccccccggcaacaatgatcttcatgctatttcttatttacctgctaatcttgaagcagcttcttcaacttctttatttgctttttgtaaaacatcctccggacatagtaaagctgttccttgcactcggataatttgataatcctcaataccgaggaaattgaacattgatttcaaatatttattagagtattcaacttcttcataccagtcatcatttgtataaattgatccgctagcttgtatgacaagcattcttcgtccatctttaagcagacccactgacccagtgtcagtatatttaaatgtttcgcgtgcgatcatgatattgtccatatagtcttttaattttgatggaatattgaaattatgcaaaggcaaaacgatgacatacgtttttgcacttttgaattgtttcaatacttctgtcatgcgttctgttactttttgttcatcgcttgtcagttcttcgccctttccagccttatcccatgcgcttaaaactgttttatcaaccataggcacttcatcactatacaagttaatctgctcaagctcttcactctctggaattaattctttgtaaatttccaaaaagtgtttcattacccgtaaactatatgacaacgtatcatccacttttggatgtgcattaatgataagtgttttgctcatttaaaactctccttttattttatattaaagattaatttaatcgacgatcaactcggtctttaatataaaccctgcagtttattttgtcaaacggaacaaatcatatactaaagaagggttttatgattgactatcaccaaaaatactcctaagatacaatatgataacccttaaaatcaaaagcaggtgagtttatatgcagtacagtgttggggttgaatatgctttacattgtctggtttatttaatagatgttccctccaaggaaagtgtcgggattcgggaccttgcagagttccaaggactttcagaaacatttctttcaaaagttttcggtaaattatctaaagctggtattgtaaattctgtccctggtgtaaagggaggatataggttagcaaaatccccagaagatatttccttttgggatgtaatagaggctgttgaaggaccaaaacccatttttcaatgtaaaaatattgtaagcaatggtctgctttatcgtgacaaatgcaactcctgtgaatccagcaattcttcttgtacaattaacttggtaatgcttgaagcagaagaacagatgcgtaattatcttcgtaataaaacgctcgcatggttaaataaagaattggacgtagtattgcctaaaaaaacaaggacagatactcgggaatacttcataaaaaaaagctctgactaaattaattagtcagagcttttttgtgcttcaagatgcctttaaattacaagtcatattatgttttttcgttttccttctcggcgtttgaatttgtaaaaacaatgccgtacgtattggtgcttctcttgcataagaaagcgcaaatgttatactcatattaaagactatattaatcgccgatttatacggtctcttataaaaaagaataacaatcttcttttttacagattaatttcaaaaaaggaaggagaaatgtaaaatgaaagcattaatgactctgtatcttaggctcgctttaggaattagctttttatcttctgtagccgatcgattcggactatgggggacacctggcaagcctaatgtcgtatggggaaacattgaaaattacacggattatgtcgctgccttaactccttttataccaaatgctcttgtaccaatagcaggatggatagcaactatgtttgaaaccatcttaggaatacttttgatcattggtttcaaaacaagaataactgctgtattgagtggtgctatgttgattattttcgctctaggtttaacagtaggaacaggttttaagacttctcttgactattctgtattctctgcatctgcaggtgcattcatattaatttattttaaaagagtaccctatagtatagatgctttactcatgaaaaaaactgtagaggctgaatcattttcacttgagtcagacaaatagccctcaaacctctaaaagatagggaaagaaatatcgaagcataaaaaaggagcagacataaagtctactccttaattttcggtttccttccctttaacttcttcataatcaggtgttttcttatacagaccaagtcggtcgccatcacccggcatatgtgccatttcctcataagaatccccaagcttctcataataagaataagcagtcagcttacgagaactttcctcaaaaaaataccaagggcgtctgcaacccttggtatcattgatgcggccgagaggacttgtacctccacgggttactcacccgctgggccctcaacctagtgaaaacgtatcatgtattacataaaccttataaataaagcattctttatctacatttccacttgttttcttctttttttcgggcaaaaattaggcattactttttttaaaaaaatcactgaaaatattagctttaaatttgtaattccagctaagatctaagaaaccactaacaaaggaagtaaggtggtctcgcccaataggtgcgatagttttttcttttggtagtatcttgacttgtccgattttgagtaaaaaagagtacgtattaatcttgaatagaacaaaaaacactacccttttcgttactttagagaaaggatagtgttttttggttttgcgggtatcggaaaatctttagtagcagtacctcaataaaagatcgcaaattccacttacctagctatatcaaggcttacttgtctgatttgggatgtatggggtacaaaagttgagttacaaacattattatccaaaagaatgtttactgtaattattttacatggtattatttgtatcatgcatacgaaatatgtatgtataataaatgaaattaaaaggagtgcttgatcgtgaatcttaagtccattttcaaaggagtaacatcgactctgatagctggtgtaattgttggaacttgtactatacctgcttttgcggagtcgactacaagtgtatcgtcgaaaaattatgcagttacaagtggagtattcaaagctctagatagggaaatttcagagggttctgttgatcaatcaagctggagtcgggagttcgaattagatgagaatgacggagcacaagtaaacttctggatttcaaataacggaagtaatgacataaaaatatcaattgatggaaaagtctcaagaaccatcgcaccaggcaagcaaggcaacatttctgccgaggttaaaaatggttggtttggttggacatacaattacacatttacagcttcaccaacggctcaaggtggtagtgttaagatgaaatataaaattgctcaaagaaataattaacgaattacggaaaggtaatcacttattacctttccgtaatttcatcatttttttagttttttaatagattccttaaataaaaggtttttgtattaaatcctatatgatgcaaatcaaaccgattagtaattacttttctccaattttcttctcctgcttttcctgctcttttcccctcaaccttacgagtattatcatgtcctatatttaagggttatacagcgctcgttatcattatttacaccttttttgatgttttttcatattttctggacagtaaatgggagtaaagagaccttgaccactcaccaagataagtaaaataaaaaacgaagggcatcaaactagatgacttactataagtaagtgggcagtaacagataaatttctataaacaaaaaataccaagggtgtcaaaacccttggtatcattgatgcggccgagaggacttgaacctccacgggttattcacccactaggccctcaacctagcgcgtctgccattccgccacgaccgcgtgctatgaagctgtctttccactaagcatataagctagtgatgatgatcagcactttgaaaagaaagtgcgggtgaagggactcgaacccccacgtcgtaagacactagatcctaagtctagcgcgtctgccaattccgccacacccgcgtgacaagtggtgagccatgaaggactcgaaccttcgaccctctgattaaaagtcagatgctctaccaactgagctaatggctcgctctaaaagtgattcaaaaattttaaataaaatggctgggctagctggattcgaaccaacgcatgacggagtcaaagtccgttgccttaccgcttggctatagcccaacgaaggtaaatggtgacccgtacgggattcgaacccgtgttaccgccgtgaaagggcggtgtcttaaccgcttgaccaacgggccgtctggttgagaacttatctggcggagaaggagggatttgaaccctcgcgccgcttacgcgacctacacccttagcaggggcgcctcttcagccacttgagtacttctccatatggctccacaggcaggattcgaacctgcgaccgatcggttaacagccgatagctctaccactgagctactgtggaataatcagactttctttattataaatgatgcgacatattgtgtcaagaagcaacatttatttttttaagaaagtgtcgttgtctctcaacgacttttataatttaacatagaacattaaaatgagtcaagcctttttaaaaaattcttttgatttttcctctgcactttccgcaggcatatctttccggattcattgcccgcttctttatatactgttggccgcaggccgcgcatctatacatatatgttttcttttgtgtctttttggtttgcagcggcgtgcagaatctcggcgctccgactttctgaagcaggtctctgaaatctttgtctctgtgcttgtacccttttccttcaaggtgaagatggtaatgacacagctcgtgtttaatgattccttccagctcgctctgcccgtgttcgagaagatattttcggtttaattcgatgttatgggaagacagcatgtaccggccgcctgtcgttttcagccggtcattgaaaaaggcccggtgacggaacggttttccgaaatcctgtgcagagatgtcttccgtcagcctttgaagttgttcgttatccataagtgcaccccgctttaaaaacattgaacgggacaattcaccgttcgcatacaatgagttaaaaccgacctctaactaaaagctgaggaggaatgagccatgccgaattggctgatgaaacaaatgcaaaaagcgtttttagaaaaggacaattaccaaattaaactgctgaatcagtgctggtatttctacagaaaaaaacactgctcgtaagcagtgcttttattttaccatagacagcgacactctgcctttttgcacgtccaccccttcgacccatacggtgacgatgtctccgaccgatacgacgtcgagaggatgtttgacgaattgattgctcagttttgaaatgtgcacaagcccgtcctgcttgacgccgatatcgacgaaagcgccgaagtctacaacgttgcggacggtgccctgcaattccattccttcctttaaatcctcaagctgcagaacgtcttttttcagcaaaggcttcggcacttcgtcacggggatcgcgctccggccttgtcagctgcccgcaaatatccgcaagcgtaatttcccctataccgagctcttcagccgtttcagacagcggcagtgcgctgattttctcttttacgtccgcgcttccgatctgatccgcagtgagctgcagttttttgagcagcgcctttgtctctttatagctttccgggtgtatcccggtgcggtcgagcggttcctgtcctccgggcactctcaaaaagccgatgcattgttcatatgtttttgcgccgagacgcgggatttctttcagttctttgcgatttgtaaatttgcctagttcatctctttttttgacgatattgccggcaacggttttggataacccagctacatattgaagcagcgcggctgatgctgtattgacattcaccccgacttggttgacgacggtctctacgacaaaacggagagattcgtttaattgcttttggctgacatcgtgctggtattgcccgacgccgacggatttaggatcaatttttacaagctcggccagcgggtcctgcaacctccgcgcgatggagacggcgctgcgctcttcgacctgaaaatccggaaattcttcacgggcgatttctgacgcggaatacacgcttgctccggcctcattgacgatgacataataaatgtcacgctctgtttctttcagcacatcaacgacgaattgctctgtctcccgtgatgccgtgccgtttccgatcgccacaacctcgacttcgtaccgatccagcaattctttgatttttttccgggcttccgctgtcttttttacgggagcgtgcgggtaaatgacgtcgattttcagcacttttcccgtctcatcaacaactgccagtttgcaccccgtacggaaggccggatcgacgccgagcacaactttccccttcatcggcggctgcagcaggagcttacgcaggttttcagcgaaaatatgaatcgcctgcgcgtctgctttttctgacagctctttgcggatgtcgcgctcaatagccggctggatcagacgtttgtaactgtcctcaatggcctctttcagcgtttctttcacaggcgtttcacggtgtttgataatttgcttttctaaataagcttttatctgatcggcgggcggttcgatcgcaatctttaaaatgccttctttttcaccgcgattcatcgcaagcactctgtgaggaacgaccttttggatcggctcttcgtactcgtagtacatttcatagacgtttttctcgtcatctgcggctgacttgcctgccgcggaagtgagaattccttttttatacgtttcctggcgaatccactttctgaaatgaggatcatccgagatttgctcggctatgatgtgcttcgcgccttcaatggcttcctctcttgaagcgacttctttttctgcactgatatattgatcagcgatgtcgtgaaggcggttttctttcgggagagaaagaatatagtccgcaagcggttcaagacctttgcttttggcgacggtggcttttgttttccgtttttgtttgaagggacggtataaatcctcgacttcctgaagcttaaccgcttgttcgattttttgcttcagcccttccgtcagcttgtcctgctcagagatcaatctgatgacttcttctttccgctgcgtcaggttttgtatgtattgccaccgctcggagattgcctgaatctgcacctcgtccattgagccggtctgctcttttcggtaccgcgcaataaacgggacggtattgccgtcttccagcaggcggatgacactttcgacatgtttttgggataacgctgtttcttcagcaatttgttttttcaaaagggctaacgtttccatatcacaaaagcctccatctcttcattctttctctagtgtatcaaaaaacggcggaacataaaaaaagcagccttacgataaaagctgccctagaatataggtcaaatcatcacgtctggatgttgtgtacggatgaagtgattttgatatatcttctattgagtgtccctgctttaagcaggtgcggatatgcggaacctcaagcccatccgtgtagatgatgaacctcgcccctttttcgtatgatgacgtatacgttttgtatctttgcggtttgcctgagaggtaacccgaaatcggcagcggatgaaagacttcgcctgatggggagtgcaagaagaaacggacgttgccgatcgagcagtatgtcaattcccttttgatgaaattgatttttaagatggaggcagtcgcccctcttttgtttttcatcgcttgattgcagcgctcaatgatgctttccacatcctcatccgcatacgtttccacgatgtctttaatggctgacgaggattcgttggcaagagatccgctgccgagaccgtccgctaccgcgcaaactaattcttcttcattcgccttcataaaaaagctgtcgccgcatatggacttgccttctttatttaattggtatacaagagtttgaacatgttcattttcttcaacctgaatcattacattagctccatggagggatctccaatcaaggcctctctcagttttttcaccgctttccgctgcaggcgcgagacgtgcatttgagatattccgagaatgtcccctgtttctttttggcttttattttgcacaaatgttagatcgataatctgtttttcgcggtcggacagcacatgaagtacgcttttgatcatcatctgctggttgacgcgttcgtatccttcctcctgcgaaccgacgatatctaaaatcgtgacggtgcttccgtccgcatccgcttcgatgctgtgatcgacagacagcgcctgatagctttttcccatctccatcgtttcaagcacttcctcttctgacacatcgagaaaggctgcgatttcttcgactttcggcgaccgctgcgtctctgtcgtcagctgatccaccgccattttaatgcgcggcccgagttctttaatccgtctcgggacgtgtacgctccatgttttatctctgaggaagcgttttatctcgccgatgatggtcggaatcgcaaatgcttcaaaggatttgccgacctcgggatcataccgtttaatggctccgagaagtccgatcatcccgacctggcggaggtcttcgtgaaagctttttccttttgaatatttctttgccagcatttcgacgagattggtatacacctcaacgagtgtttcctgggcttctttattatcatgtgtttgaaagtcgcgtatgagccgatcaacttcatctttagttagtttcgtagtttttgatggttgtgccatgatcaactcgctccccatttaaatactttgtcatcgccacggttacgccagagttgctttgaactttgacttcatccatgagcgtttccattaaatacagaccgagccctccttctgacaattgatcgactgtgtgcgaaggagtgtacggcccgagatcctgctgcttctgatcaaaatcaaagctgtctccctgatcggcgacaatgacctccagccgatcctcaaacacaccgaaccgcacggatacttctcccttattttcatcgttgtatgcatgctggacagcgtttgtacaagcttcgctgacagcgatttttaaatcttcaatgtcatcataggtatagcccattctgcttgcgacccctgataacgtaagcctgacgattcctacatattccggttcggccggaattttcatctctatataatcaactgatgtactcattgcacgccaccttctgactttgccgaaatgtcgatgatgtccttaagccccgtaatttcaaacagacggacgagccggtcggaaagattctcaagcttgagagagccgccttccttgctcaccgttttaaacacgcctacaaaaacgcctaaacccgtactgtccatataatttacatcttttaagcagattctcatgtccttcccctcgtttgccaggggcatcagcttttcacgaaccaccggagctgagtatacatcgatttctccagcgattttgatttgtatatctgaaagattctccttcatatctaccgttaaattcatcgtatcacctctgaaagttatccttactcgtgctaatggctttttacccgtgctgccgtttttttaaacctttcttttcaaaacaattaacgtaaaatcgtcatgaagctgaaagtcctggagtctcagcaggctgtcgtaaatatttttgaccatatcctgcgcggagcagtccatatgttcttccagcatgcgctgaatgtcgctgcgttctaagaaaccgttttcggtacggcattcggtgacgccgtcagaaaaaagaacgatcatgtctccttcgtccatgtgctgttcatattggctgtaatcaaaatcctgagaaattcccagcaccaatccttttgcctccagatcataaaactttttttctttttcagagtagtagaagcccggttcatgccccgcagaggcatatgtaaattggtgatttttcgtattgtagtttgcgtaaaacatggtgataaacatgcttgaatccacgttctgttctacaacgcggttaagatttttcagcacttgggaggggtgaatgccgatctccggaagagagtccatggcatacttgatcatcgacatgcacaatgcggcgggtattccttttccgatgacatcggctatcgcgatgttaatcgattccttgtctttgacaaagtgataataatccccgctcatctgtttggcggggacgctgatcgccccgatatccagatcttcttcttcaggaatttttgtgccaagcagcgtctgctgaacatttgcggcaatttcaatttctgaacgaagctcctgctggatatctctcagactttgatgttcctgataagccatcccgtagccaatcatgacttctattaaaaaatccagcgaatgaaaaacatcttccggcagatccggatacagttcctttactacttttcggtggatactgataatctcctccggaggaacctgatgttcaatcgtttttcggctgaatttttgggcttgatataaagatgtttctgttaattcggctatatatcggctaagcagctgatgataccgctgctctataacctccctgaaatccacgttctaacctcctaccgaagccatttcacggcttgaatctctgttccttcctctgcaacagattgcaggctgaattcgtccatcagccttttgacgcccggaagtcccgctcccagtccgcctgacgttgaaaagccgtcttccatcactttacggatgtcggggattccgggtcctttgtcttctgctataattttaagaccttttttccctctgtcgtttacttgttctatgctgacctggcctttgcctgcatataagtaaatgtttctggccaattctgagatagccgtcgtgattctggcctggtccaccgtgccgaagcctaattccttcgcaacgttgcggccaagctgtctggcggctacgatatcccattctgtcatgattttcacacaggattggtcgttcatcgctattcccccaattcccgcttcaatgtctcaagcccttgctctaaatcgagcgccgtttcaatttcctcaagtgagattccgagttcaatcaatgtgaccgccacagcaggctgaattcccgtcaatacgacctttgcgcccatcaatttagacatggtgatgacatcgccgagcactttcgcgataaatgaatcgatcatgtcaacggatgtcaggtcaatgacgaccccgtttgcgccggtttcatagattttgttcagcagatcttcttgaaaatgcaaagctgtctggtcgtcaagttcccattggatggataccaataagcagttatacagtttcaggatcgggatttttggatgtctcacaatgttattcccccaatgaaacgatttttcgatttgtcatttcaagcgctgtttgaattcctttttgaagggtattcttcgtaataacctgcgacaaatcaattcccagattaacgatcgtctgcgcgatttccggacggattccgacgagcaggcatttcgcgccgacaagccgcaccgcttctgatgcctgaataatatggtgcgccaccatcgtatcaacgaccggcacgcccgtgatatcaattaatacaacctgtgaacggtgcttcacgacgccgtttaacagattttccataatgtgctttgcacgctccgtatcaatcgtcccgacaagcggcatgaccgttacatgctcaaataccgggatcagcggagccgacaattcctgaagcgcgattttttgcaaagtaaccgtcttttcccaggagatagaatactgatttaaaatttccgtattgatcggattgaaaaagctgtctatttccaaaatcaaatctgctctgtcctgatcggccatattaaggtcgaccatcgtttcgtaaagcagtttccaaaactctgacagggtggctgaaagaagtttcagtgacaggccgagctgaacggcgcgcagtgcgagttcactgatctgctcttccgtagcctcgtcatttttagtcgataataaaagaatgtctatatagtctttacaaatattttcacatatgtgattcgtaagctgatagtcttcctgattgcctacttcttttagtttggctgtccaagtatcaagcagttcatcatgctgatcaatgatgaactgatacactttctgattcgacatgggtttcactgacctcccgacacaaaacaacaaattttgtttgattatctctttattatagcgcttatgtttttcgaaaacaaaaaaagttgctctatatgagcaaccaaaatatgactaaaaatcaatgagtgccaaactgatttgcagggcttcatcaaccttatccatcatttcatcatccagatgagttattttatccgttaatctttgcttgtcaatcgtccgaatttgctccagcaaaataacggaatctctttcaaaaccgtagcgttttgcatcaatttcgacgtgggttggtaatttcgctttctgtatttgggctgttatggctgcaacaatagcagtcgggctaaagcgatttccgatatcattttggatcactaaaaccgggcgtacgccgccttgctctgagccaacaacaggagataaatcagcaaaataaacatcgccgcgctttacaatcaaaatgattatcctccgctgactaagcgctcaacggtcgtttctgcttcgcactcagcatagtgagcctcagaagagatattcaagttgattttcgccatttccatatacccgcgtctcatcaaatcacggttatggcgagttgtccgttcgctgacatacgctctcactgcttgtgatatcagttcgtttctgcttcgtttctcccgcatcgctacaccatccaattcagctactaagttttcgggcaagctgattttcatttcggttcttgcgctggattcagacaaaaaacatacacctccaccaaacttacggatacgaccaattcatccatccagacataatgataccattattcaaacgtcaagcaaagctgttttataaattctctttttccggatgacggctacttgcttgtattatcttgcagtaaaggatttcttacttccattatactctcattttccaaaaacatacggggaacgcgggaactaatggtacaagggacctcgtaattaatcgtcccaagccgcccggcgatttcatccatcgtgatcgtttctcccttctggctgccgatcagggtgactttggtgcccggcggataagattgatctaattcgaccatcaattgatccatgcagattcttcccgcgatgttcatccgtttgccgccgatcagcacagacgtgccgctcagcttgcggagccacccgtccgcatagccgatgggaaccgttccgatccattgatccttctctgccgtatatgttgcgccgtagctgacgctttcccctttgcggatctttttcacatgggataaaacagagtgcagcgcaaaagccggctttaattgaaacggaatttcgctttggatgtcagcagaaggacgaagcccgtacatactgatgccgaaacgaaccgcgttaaagaagccctttttaagacgaagtccggcagcgctgttcgcgcagtgcaccatcaattcttttaaagggagcggagcgatcaatgttttaaagcggtcaaactggaagaggaaataatctctgtttttctcatccgcggtagcaaagtgggtgaatacgcctttacagactaaaccgggattttggctgaggatttttaacacgctttggatttcttcctccgttttgactccgagtctgttcatgccggtgtcgactttcagatgaaacggcactgtttcacttccgaggtggcgcgcagcttcctgaagccattcaacagaataccccgtgagtgttacgtcatactcggcagctgcttgtacatattcgggcggcacggcgccaagcacgagaatcggcgctgtaatgccccgttttctcaatgaaatcgcttcatccagtatggctacggcaagacaagaggcacccgcttcaagcgcggctttcccaacttccaaatctccgtggccgtaagcgttcgcctttacaaccgccatgagatggacgttttgcccgatgtgttttttcatatgcgtgacattttctttaatcgcggacagattgatttccgcccacgtttctctgtaaaaggatgctgtggtcattcgatacacttcctagcattattttcaattcatattgttattatcatactaaaattattctgcaaagtgaaatggaatcaaaaaagagaccgacagcggcggcctcttttttgacgttattttgacgactgtccctgcatgcttttggcggcggccaccatttcatcttttgtcagatcctgtgatgacagaagataatccactccgtcatatgtccacgttaaagacgtatcagataatgccgcaaccgtgaagccgagattaaccggttcgcctttcagcgtgacggcagaggcggcttttgcgatatgagctttttcttgaataagggtgaatgatttttctccgccgtaagtcatgacgatccgtttgccgtccgccgttgaaatatctttctcttcaagctttttgacgccggccggcacttgaagcggtgttttgaccgcaaatgaatcagacggcttggcgcttgtggcgacgtccatctgggaaagcgtcatatttttcttctcgtcaaaagagtctttatcaaacggcttgttgaattcaaagcttttgaattcgacttttaccatcactttccggtctgtatccatgactttgacgagcgacgggctcatgtcctttttgttgaaagtgatttcctgagtcggcagcattttgttgtgctgatagtttgtttttgtttcaaacgtgtactttttatctttggcggaatagacggcgtctttgtcatgctgcacgtcctttacaagtgactcaaacaaatatacttggctgctgttattcggccagtcgctttggaatctgaagctcttatttaacgacggcgtgaggacaaagactccgttggcgttccgtaaaatgacttggttttggtcttttttcggattttccagatagacccggtacagggaaggttttttatgccagatttccacattgtatacttgcggatcactccccgtttcgatggtcattttggctttcgctttgtacgaggtgtattctttcgccttcttatctaaaccgttcacgatatcttcctgtgatttttggccgcaggccgaaagaataaggacggcaagcagtcccgttaaaagcaaaacaaagctttttctcaccttttttcaaccccttcttctcaattgatgtaaagggaagaaatcgcttgtttgactttaacggtacgccctgaacggacggacgcgtaccataaaagcctcaaacaacttgtctcccttaatgcactatcaaatatatgaaggggttccggctaatatgcagactagcgtgacaacctttcaatcacgacctgtgccgcggcgtattcttttgtatgggtaatggagacgtgaaccgccgcgccgtcaagcttggcgcaggccagcacaggctttcccgctttgtcgtttccagtttcaatatcctgaaagctgagctctttgccgatacctgtgccgtatgctttcgaaaaggcttcttttgccgcaaatcttcccgcgagaaattcaattttccttttgtccgacagcaatgtaaaacgggcgtattcagcctccgtcaatattctttgcggaaatcttgcctgccggctgagcatgttttcaattctgtgcagttcaacgatgtcgattccgattccgaaaatcatgtgaattcctcctaaaagtccgtactaaaaaacggtttatgtcataaacgtgttactatatatgtaacaaatcagatgcaaaggggcttgcgatgtttatacgaacggaaaatttccagacttttatcagacgttatccggccgtcagctgtatcttggcactgcaggcgttcttgtggctgtttttcagtatgccgcttcattccgtcatgatgtggtcagatgctgtgaccggctataattacggcgtttcctcgggagaatggtggcggctggtgacaccgatgtttttacacgcgaatttcactcaccttttgtttaactccatgtctctctttttattcgcgcccccgcttgagcagatgctcggaaaagtccgttttctgattgtgtacatcgcatcgggcatcatcggcaatatcggcacgtatcttgccgaaccgcttgattatgtgcatgtcggcgcatccggcgcgatcttcggacttttcggcgtgtatgtgtttttgactgttttccgcaaggagctgatcggccgggatcagtcgaaaatgattatgaccctgcttatcatcgcggtgctgtcgacgtttatcaactctaatattaacattatggcgcatttgttcggactggcaggcggatttttgctttcctttttatgcgtgcagcaaaaaaagcggcggtattaaccgtccgctttttcatatgaataccagcgcccgatgcgttcggcatcttcctcgctgacatccttcagcatgacatgctccatgtggtgagctgatttcactgcggtagccacagatgcgagccgccttcttttttgcagaaaggagcggctgacttcaaacatctgcattcttcttctcagcataatcgtggtcgtcttcccgaccagcctcgtggtgatctgaagcctgccgccgtttatgcaccatgacgctgtcctaaacgaggcatatccaagcaccagttcgacgggaagcacaaggagcgatgcatatccccacggtttaaacagaatacaaagcgggatgatcacgaaaaccgagaagattatggatcggaataaataccggcgcagcgcccttttcggcaaatgatttcggttttcttccagcacgtaatccggtgtgaaaccgttcagcatcactccgagctttgatttgcggatgatcggaaacagaatcgtctgagctccttctttctcattccccgcactgccggcgctgacaatcgccaccgtcgcgtatccgaataattgcctgatcacattttctttcattttaatggcttggattttacggagcgggattgtcacttgatgtttttcaataattcctctggtaatgaccaattcgtgttcctttttttctatcttaaagttggcatgcttgatcatcataccggcgatgcttaacagccaggcgatgaacaatcctatgaaaatgatcacggcgtatataccgatgctcgcatgcttgagaaaagaaaacctgtcatagagccagtccatcggaagtacttcatcaatctgagaaaagagggcgaataccgctgagatgatgacaccgattcccccggatgttgaggcggccataagcagctcacctacagacagtcggtaaacggattgcacatcttccccgcgcatcggctcctgctccgctgcggtctcccctcgttctttttgctccgctttttgctgaaaaacagccgctctgatccgttccgcctcttccacagtaatggcggataagacggcctcggcgtttttcccgtcgccggccgtttcgatttgaagcttaacaagcttaaaaagctgctgaatgatgccggcactcgtattcattgattgaatccggtcaatggagatgtatctctttttcgtaaaaaacaagccttcttcaattctgaattctccgtcctcaatccggtatgtaaattttctccactcgatcacactagccgtaatcagccagataagcaggacggcgagcgcaatgcctccgtaaaagcggatgaagtggttggagtttacaatatagacgagaaaaaatggcagaataatgtttttaatggtttcgataataatatggaataagttcaaaatcacggccgccgggtgcagacgtttcggctcagacatcatcttccgtcacccttgccagacgggaaatggaatccctcagccggtcagcttcctccatatcaagcgccggaatggaatgaacggttgccgccgtggagattttgactgaggccagacggtaccttctgaggagcgggccttgtgaagtatctacgtgctgcaccctcaccatcggcacaatgacccgtttgacaataaaaatgccggattgaatatcaatttcattttcatggacttcatagcgccagatcctgtgcctgattttcggtatggcatagacggatatcactgaaccgaatatccaaatgatgccgaggactccggtgatccaatacggccaatggaagaaatggcttaaaacagctgctgctataacggccagaagacagaaggcggacaggatgatttcctgaagacgccagacttttaagccgcttggactgattcgattttttggctgtgctctcaacatacctacctcccattttttatcatacatacaaatacggctgatttgcaaaaaagattcactttccggcatatcaaaaaaaagcggaccccgtacaagggtccgcttcctgtgttttagtatgattttttctggcgtctgtcacctgaagaacggcggtcgcttgagcgttttttatcgtaggaagaacggttgttggttttccctttgccgccgcggtagccgccgccttggccgtctctgcgcttagaagtacgctggtttttatagcgtttgctgaccatcggcgcttcatcagtgaggcgtacaggcgtgctgtccggctcttttgtcgccattttaatggctgcagccacaactgtcactgcatcatgatcttctaacaattccgcagctgccgtcatgtagaagttcaggttgttttcgctgatcgccgtgcgcagacggtcaaccgtcacctgctgctgtccttctaatgcttcgtcaagcgtcggctctttcatacggtccattttgcgttttgtcgtttgttcaatcgcgcgaagcatgcttttctcacgcggtgtgataaacgtcatcgccatacccgtttttcctgcacgccccgttcttccgatacggtgaacgtagctttcaggatcttgaggcacgtcaaagttgtaaacgtgggtaacgcctgagatatcaagtccgcgggcggcaacgtcagtcgctacaagcacttcgatcgcaccttctttaaatttacgaagcgcaaccatacgtttcgcctgcgttaagtcgccgtgaattccttcagccgcatatccgcgaaggttcagggcttcagcaagctcatcgacacggcgtttcgtacgtccgaatacgatcgcaagttccggagactgaatgtcaagaagacgagtcagcgtatcgaattttttgcgttcctgcacttccaagtagaactgctgaatgtttgatacagtcatttctttcgcttttacttttacgtgttccggctcagtcatgaaacgctctgcgatccgtttgatcggcgcaggcattgttgctgagaataagagcgtttggtgctcgctcggcacgtttgagagaatggattcaatatcatcaatgaatcccatgttcagcatttcatcagcctcatccataacaaccgtattcacgttgtttaaacggatcgtgcggcggttgatatggtcaagaagacgccccggcgtacctacgatgatatgcgggtttttctttaatgcgcggatctgacgtccgatatcctgtccaccataaataggcagtactttcgcacgcttatcttgtccgattttatataactcttcagatacttgaatggctaattcacgggttggcgcgattacgattgcttgaatattaggagactcggggttcattttttcaacaaggggtataccaaacgcagctgttttacctgtacctgtttgcgcttgtccaatgacgtctttatttgaaagtccgagcggaatcgtttgtgcctgaatcggcgttgcttcttcaaatcccatacgattaattgccttcatgagatcagaacttaattgaaaatcttgaaacgttatagtcaaattattcaaactccttctaattgctgtttcagtaatgtcgtgatttaccactaaaaactgtcctttcattcaaaagacaggatcgtacgtatacaaagcccgaattactttacgtttaatcttaccattacagtatgtgtttttcaataaggcgagatggtcaggcggccggaagcggcctgaccggattcttcccgcgaatgatgccggcccccgcaccgtgcgggttttcccagccggcgggatttctttttcatacggacagaattatttcaccctgaattagtttcttcatttttgataattttataatgctgatcggtattttttcagttcttctctaataaatctttaacgatttcttcgagcttcatacctcttgatgctttaaacagcaggagatcgccggaagcggcacttttctgtatcgcgtgaagcagttcttttttgtcaagataatggctgacgcgcccttcttcaaaatgccggcgcgctccgtcagcgatgaatgcgccgagtgtgccgtaagtaaatacatgatcgatttccgccggattgatcgcggccccgcattcttcgtggaatgctttttcattatccccgagttcaagcatatcaccgagcacgagcattttcttccgatagcctttcatcgtttcgattaattcgaccgccgctttcattgacgtcgggctcgcattatacgcgtcgtttacgattgagatgccgttttccgttttgaccagttccaatctcatacccgtcaccttcaggcggctcagtcccagagcggcattttccggcgtaatgccgaaatagatgccggcggcgtatgcggccatggcattcatcacattatgtctgccgagaacgggaataaagaaagaacggtcgattccgtcgatattgaagtacgtgccttcttccgcctgttttattcctttcaggcggagatcattgtccgcgcctgcgccgtatgtcgttgtccggcaagtgtacgtcttttcgcgaagcagcggctcatccccgaaataaaacagaacgccgtcttcccgaagtccgtttataatttcaagtttcgcctccgcaattccttctcttgagcctaaatcctgcatgtgggattcgccgatattggtaatgacggcagcttccggttcagcaagacggctcagaaaatcaatttcgcctctcgcgctcattcccatttctaaaacggcgatttctgtatcttcaggcatggcaagcacagtcagcggcaggccgatatgattgttgaaattgccggcggttttgtgaacgcggtactgcgtgccgagaacggcgtgaagcatgtctttcgttgtcgtttttccgttgctcccggtcaccccgataacccgtgtgccgagctcttccaaataagcttttgccaatgtctgcagcgcctccagcgtgtcatcgaccaagatgacagcacgctcctccggcggattcgattcggagcgttcccacaacaccgcggaaacgcctttttcgaatgcttgcggcacaaaggtgtggccgttaaaatgctcgccttttaaaggaatgaacagctgatttttttccaaagtccgcgtatccgttgcggcgccctcaatcattgtttgttcaaatacgggatttgtcagtgtgcctttgaccatgtctgcgattcgttttacagttcgctttatcaaaggtggcacctcgctttctgaaaatgttgtctgttacgggaaaagacactgccccttcaggcagtgtccgtcttcattaaaatgtatgtttaatcagctgtttttcggcatggcgttcttttgccagctcaaccagctgttcgatcagatcactgtactctacgcctgcttctttccaaagcagcgggaacatgctgaatggcgtaaagcccggcattgtgttcacttcgttaatgagcacttgaccgtcattggtcaggaagaaatcggcgcggacaaggcctgatccgtcaatcgctttgaaggctttaatcgccatctcgctgatttccgcatattgttcatccgtcacttgcgcgggaatcattaaatccgtgtcgccgtcttcatatttcgctttgtaatcgtaaaagtcggttttcggcgcgatttcaccgacggcggagcatttcggttcgtcatttccgagtacgccgatttcaatttctcttccggcgattccttcttccaccacaattttccggtcatactcaaaagccagttcgaaggctttttcaagctcttcacggtttcggcatttgctgattccgacgcttgatccgaggttcgccggtttgacgaagcacggatatcccagttcttcttcaacctgctgtaagcagctgtccggcgtctgtttccagtccttttttaagaaagcggcgtacttcgcctgcggaagccccgcttgagcgaacaaatgcttcatgatgactttatccatgccggctgatgatgcaagcacgccgttgccgacataaggaacgttcagcaattccagcagaccctgaatggtgccgtcttcaccgttcggtccgtgcagaagcggaaatacgacatcgatcggcgccttttcgtcagtcgacgcttcaggaaacatttcccggttcaatgctgatagagcgaaattttcaccgttttgttccagctgaagcattttcacgttggaaaccggctcagtcagcagcgggcctctttgccattctcctttttcagtgatgtaaatcggatgtatatcaaacttctcagtattaagcgcttttgttacagctaatgctgtctgcagcgatacattgtgttcggctgactttccgccgtacaccaatcctagacttgttttcaatggatattccccccacaacaattcatctttactatcttatcactttcctcagaaaatgatctaattatttttgggcattctgaatatgaaagcatttgtatgtaattcctttttattttatattaaaatggcatggaaaaggagatgtgtcatatgaaaaaaatcagtacaacagaacaatttaatgaacttattcaatccgacaaggaaatcatcgtgaaatttttcgctgactggtgccctgactgcacgcgcatgaatatgttcatcggcgatattttggaagaatataatcaaaatgattggtatgaactgaacagagacgagctccctgagcttgccgacaaatatcaggttatgggcattccgagccttctgatctttaaaaacggggaaaagaaagcgcatcttcacagcgcaaacgcgaaaacgcccgaagaagtcacagagtttttatcacagcatatttaattcgtttcacgatctttgtttatgacttcaggctctacatgaacatggacatgagtcacatcatgttcatgttttattgcatattcgacctcatcggctacttcatggccttctttcacagacagtcccggatctaccgtaatgaccagttccacatgaaccgtgctccccaaataccttgctttcacatccttcagcctgctgacctcttttatttctttcaccgtgtgtttatacggctccaaatctttcagatcaaacccgtccgtcaatgagtgggaagcatctttgaagatgtcccatgccgtcttacagatgatgattccgatcagaaaagcaatgaccggatcaacccacggcagatgaagccgggcggttaagacgcctataaacgccccaatactgacataggcgtcagaacggctgtctttcgccgccgcatgaagcgcagaacttttaacccgatccgcaagacggctgttatatacatacatgccgtacattacaatcgcgcttccgagcgccgtccatgccgcaatgaagctcggctcggcctccgttccgctgacaatcgcctttgctcctccgatcagcacttcaataccgaccgccatcataataaaagacgcaattaatgaagaaattgtttcagcccgataatgtccgtaggcatgatcactgtccgcggggcgctgggaaatccggagcccgatcagcacagccagtgatgcgacaatatccgtggcattatttaacccgtccgctctgagcgcttcggaatgataaataagaccgatcaccagtttgacggcggcaaggatgaggtacgcggcgatattaagaatcgcgcctttttcgccccgttttaagtttgccgtttgatcattcatgtaaggactcctccattctcattcatagtatggatggaaaagcggaaaaatagcagctttgatctgagcaagtgcaatattcgacagcattattccccgggaaactttttgtcgaaaaattggcggtattttccctttacatatgaatatgcccattgtatactttcattaactgataatgattctcaatatcatttgattaggagggtaatcatgaggtcttctcctcagctcagatcatcagttgaaggacgaaaaaaacatctgatccatttgctgatcaataacggaatatacaaaaagtcggaacggcatttatatgaattatcgctcggagaattagaaagcgaatacaaatatgtaaggaaggtgcgggctcatggcgaaacgtaaaataaaaacatacgaacagctgataaaagaaaacaaggcggccattatgaataatcaaaagctgatgaatgtgatctatgacagaattgaccgcaagcatcaaaaactgctccggcacaacagccatacataaaaagagcctttttcaggctcttttttttattgctcaaaggcttccgccgctaatttgccgatgaccgcatcgtccatcggcggattgtgaaggccggcccgggcatcccgataataccgctgaagcggattgtttcgctccaggctttttgcgccggtgattctcattgctttatcaacaacagaaaggaccgcatttgtcacaatatgttttgcggcgccaagctcgcttttgatgaaaggacggcgtttcgggtcatcatacatttgcgccgccgtgaagagaaactgtctcgcttttaacaattcaagctccatttccccgacacgctgcccaacggccggcacgtctttaatcggtccgttcaggctgttcggcgaatattcggatgcaaaccggacggcatagtcccttgccgcttgagcgatgcccagataagcagcgggaatgtgaagcagccagccattcactttcgccgctctcggcccgctgataagctccacaagccgctcgtcactgaccgtgacatgatctaaaaggagatcatggcttccggtcgccttcatggcaatcatatcccatgtttcttcgactgaaacgcctgactgatctttatgaatgagaaaaacaccggtcgtttgtttttcttcaatccatgccgtcacaagcatataatccaaagtcagtgaaagggttgtaaaggtttttcggccgttcagcacccattttccgtcttttttgacagcggaggtgccgggtcttcctcccctcgtcggactgccggtctgccgttccgtcgctgccctgttcaggacagctccctttttcacctcttctgtgataaatgaaaagacatcttcatcccagctgtttccttctccgagctcacccatgacggataaatgccagccgattccgagagcaacggccgcgtctccccgcgccatccgttcctgaaacagcaccatatcataaacggaaatgcctgcaccgccgaatacctcaggtaccgttaacgccgtatatcccgcgtcgcgcagtctttgaattttctccgcgggaaaacggcccgcctcatcatcaagcgcggctgttttttgaaattcgtctgcaagcaggccgattttttccatccattccctctgccgttcattctgtatccataaagacactggaatccccccattataattccgataaagttaataagtattatagagattcaagtctcgtttcgcaactgtgaggctgtacaaaaaaacacgctattccatggaatagcgcgttcagactgcttccgggccgcggtcctgcttaagcccgagataaatcagcatatatgtgagataacccatcgtcatcacaagcccgccaaagaaaaagcttgaaaaaatcggctcttcaaacgcggtaactgccgcaagcacgatccagcttgcatacaggtagatgatgaaataacggaatcccgacttcattttatataagagaaacagccccactgtagaaaacaaacccagcgcaagcctgaaataaacaagatgttcgaattggaacatgaatgacacaaaggaaaaaccaagcaataacacaatcggtaatgcggtaataaaatttctcaagtgagcacctccgtcattacctttattataaatcaaaatagcataaattattgatttatcgtgatctttttcacaaaaatgtcattcctttactttatacccgaacatcgcgtttgcaaaagctccaccaagcgacggctaagaagaatacgatatggataatgataatgcctgcggaaaataacggcgtcattcccgcaaacagcggtttcgccccgctcatatattgcgtcaggtcagtatttgcgaacagcagaaaacttccccatttgttttggaagagcgacataatcgtcacgagtgattttgcgccgtacagcacgataaatgacaaaatgacggccgttgcgctgtttcggaatacagaagaacacaacaagccaaagcatgccatcgcaaacgcctcgacccagttcgtgccgattactttcagggtgttcataagaagcgtccctgattcagatgtcaccgacacgccgaagaaagccatgccgaacagcagagacagaatatagtacgccgcatacaggtacaagctgaccaaaaatacggtaatgagtttagatacaaaaatccgctcccgctttaccgggcggattaacaaaaatttgatcgttttcttatcaaattcagcggaaatgatcgttgccgcgatcacgattgttaacgcctcaagcagaatattcagcccgggcgcgtacgccatatagccgatgaaattctcatccgttccggaactgatgacaagccgtttaatgacaagcgccataataaattggagaacggccatcagaatcagtgccactaatgagacttttcggttaaagagtttcatatgctcattcgctgtcaatttaaacattcgtctccccctcctcttgaagcgccgtcgtcactttcatgaattcatcctccagcgattccgcatacggcatgatggaatacacgagaaagtcttgtccgacgagcgcacggtttaatgccgggatgtccttcttcgctacggtgacggtaatgcccccgccgtttttctccggagcaaattgctgctgggacagccattcgaatgcttcgtcagccggctgaatgtcgaggacggctttttcttctttttcctcagcgccgcgcagaacaacctctgttttgatctcacctttttgaatgatgatgacacggtcgcaaagatcctccacttcacgcaataaatgcgtcgcaaaaaggatgctcgtcccttcaagctccgcgagttcctttaagtgatcgcggaaatccttcattccgccgggatcaagcccgtttgtcggttcatctaaaatgagcagattcggacggtgaagaatggcctgcgcaatcccgagacgctgacgcatgccaagggaatacgttttaactttgtcatgaacggcattggtgagcccgacccgctcgatgacttcctgaagcctgtcctctttgatgtttttgtgcatgttggcaaagtgcttcagattttcccaccccgtcaggtacgggtagaattcaggattttccacgatcgctccgacggattcaagcgctttttcgaaatcagcatcgtgctgaaagccgttaattgtaatcgtgccgctgtttttctttaaaagaccgacgatgattcggataagtgtggtttttcccgacccgttcggaccgagcaaaccgatgatctcgccctgcctgacatccatgctgatgttttttaaaatgtgctttttgcctattgttttgtcaaggccttcaatatgtaaaatcggctcagtcatacagccttcctcctttttcacaaaaaataaacagtgcccgtacataggcactgtctgcattataacattagtcatatattcgtgaagagccggagccgacgttatgtcttatccgggaccggtccatttttttccttctcttcattattgacgacatccagaatatcgagcaggaacacaaaaatcggaattccgataatcaagccccaaatgccgaagaaatgttccgagaaaatcagaactgtaaaggtaaaaaagatcggcagttccgttttcgctgacatcagtttcggattaaggaagtacgtctcaatcgcatggatgacgaaaatgaccagcacgatgtagatgacatacgctgcgccgcccgtcgtatacgcgatgatgctgagcggaatgagcgaaatcaccacacccgcaacgggaatgagcccgaggaaaaagaccatgatggacaggccgaacagctgcggaaaatgcagaatcgccaatgcgatcaaggtgaggatacagttcaccagcgcgataataaattgggcttcaagcactttgccgaatgttctcgcaaacttgctgccgaaataagcaagttcgtagtaaaaaacagacagcttgctgtgctgaaattttttcataaactccgtgagccgctttttctcgaacaggaaaaacatgctgagaatcagtgacatcacgacctgcaaaccgaaagtgctgatatcggccaagtatgtatacagtacattaaagccttcttttacataggaaccgatattgatatcgccgaacacgctcgatatctcatcataaaacggaatgacatcgggatgatacgcgatgtgcttgatctgcttaatcagctgttcaatctgcttggcaacaatcgggtaaaagacaaagccaccgacagtcgccccgacagccagcgcaatatataaaacggtgatgaccaccctctggctgatccggaaaaaatggttcaacacgtgccggatgacagtctccagccgatccatcagaaaagtaaaaataaacgtaagcaaaatcaaattaatcatacttcggaatacaactaacaccccagtcaaaacaagaaaaacggaaaaacgtctgacacccggatgctgaaaaaatttaaaaatagccgccatttatacactcctgctaggacaaaaagcccttagatttcatctttcactctctaattgtaaattatataacaaaatgacgctaaggtctttgtccacctcctaataaatttaaacaaatttatcttttttactcatggcggccgaaaaaaagaacggcatgcccgatgcatgccgttcctttccttttataccgccgttttcatttctttaacggcctgtgtgcttttcacttcgtcaaactcattttcgctcttggctacgatgatggtggcgattccgtttccgatcaggttgacgatcgcccttccttcactcataaagcggtcgacgccgaggagcagcgccagcccctccagcggaataacctgaagcgccgataaagtggaggcgagcacgataaatccgcttccggttacgcccgccgcgccttttgatgtcagcatcagcacgagaatgatcgtaacctgctggccgatggtaaggtcaacgccgaacacctgcgccagaaaaaccgtcgccatggacagataaatcgaggtgccgtccaggttaaaagaatatcccgtcggaatgacaaggccgacaaccgatttggaacagccgtagcgctccattttatccatcatccgcggaaggacggactcagaagagcttgtgccgagaacgatgagcagttcatctttaataaaacggagatagttccacaagctgaaaccgaatagtttgcaaatgatattcaaagcgacaaatacaaacaggaacatcgtaacgtatacagacagcatcagactcgccagcggcttgatggaatcaaggccgaagtgtccgatcgtataggccatggccccgaatgcgccgatcggcgccgcgcgcatgatgtagccgatgattttgaaaaaaacatgcgacagtttatcaaagaaatcaataatgcttttgcctctttcaccgagcgccgccaggccgacaccgaataaaacagaaaagaataagacctgaagaatgtcgccttttgcgaaagcgtcaaccatatttgacggaacgatgtgagtgataaattcaatccagtcaatcccctgtcccccgttttgcgtgtactgagagacatcccctttttcaagcttgctgtaatcaagcccctcaccgggtttcatgatattgacgaccagaagtccgataataagggcgatggtggtcacgacttcaaaataaataaatgcttttcccccgactttgccgacttttttcatgtctcccatcttggcgatgccaagcacgatcgtcaggaatatgatcggtgcgataatcatttttaccgcattgataaatgtatcgccgagcggcttcatctgcttcccggcctcaggccatacgagtccgacaatgacgccgatgataaccgccgtgatgacctgcaccgtaagatttttgaaaattttcatccctactcccccttgcctctcgctgcgtctatacaaaaatgatagcgttttcaaacgaagaggggaagcttatgatcataacggacattttggtctttttggtctcggctagcggacgaatttgtagcggttaaccggccggcccactcccccgtattgaatgtcgagcttaatctggccgtctttttcaagaaaatcaagataacgccgcgctgtcaccctggcgattccgagcgctttggcggcttcttcagctgaaagcggctccgtctgctgtttcatataggtcaaaatttcattcatcgtaaaatgatttaaccccttcggcagatcgcgggacggattttgcggaattttaagcagcatgtcaagctgctcttgcgacatggtgtcatgctcttcaattttccgtttatattgtttatagttttcgagcgcctgtctcatccgctccagcttaaacggcttcaaaatatagtcggccgcaccgttttgcagcataagctggattgtttctttgtcttttgcagccgagacgatgatgacgtctacttcgagcttttgttttctgatttcctggagcgttttaattccgtcttttttcggcatgtatacgtctaataccacgagcccgggccgcagatcttttataagcctgattccctcgtctccgtcagcggctgtggcgatgacgctgaaccctgaaacaccggtgataaattctttattcacctcctgcaccatcggatcatcttcaataagcagcaccttgatgtccatcgaatgattcctcccccttcatcggaaataaaatagaaaatgccgttccctgtccctgccgtgtgtcgacttcaataacgcccatccctttgtcgacgatttgtttgacgaggtacaagccgtatcccgttcctcccgttttattgacggtaaaccctttgtcataaaggtgcgggatgtgctgatcggaaatcccgcttccgttgtcttctattaatatagcaagcacttcatcattttgctcgatactgatgtcaatatgtttgtcctccgtgtccgctgtttcgaatgcgccgaacgcattttcaattaaattgccgagcaggacgacgatgtcatgctggtcgacatgctccggaaatgccgagaaactgctgttttcatcaattttcacagaaatgccaagctcttttcctcttttgattttgcttaacagcagccccgccgcagcgtcattctgaatggcctgatgaagaaaatcggtgacactttcttgttctgatgattccttaaaagcaagctggagcgctttttctgattttccgagctgaatcagtcccgcgatggtgtgaagcttgttcatatgttcatgattttgaactctgagcgcatcgacaaaatttttcacacctgtcagttcttccgccattttcgccgcttccgtcctgtcctgaaaaatggcgacggctccgatgaccttctttttcatgacgatcggaattctgctgctcataatcacctttccgctgacttggatttcttcattatataccgctcggttccgctcgacgatttcagggaggcgggaatcttttaacacgtcccagatcagcctgccgtctgtttcttgtctgacattgaatatctgcttcgctttttcattaaaaatggtgatgtgatgctgattatcaatcgcgatgacgccctcattcattgaatgaaacgtagcggtccgttcctcatacattctcacgatctcatggggctccagccaaaacatttgttttttgatgtggcgggccagcaaaaaggagccggccagtccgaacccgagcgccagcagaacgataaacagtatttcatgtttcagctgaagaagaatttcaccgaatccgggcagcgttttaccggccagaacgacgccgatctgattcaaatcccggtctttgatgggataaaaagcgcggacggcggtgccgatttctccctttgcttcggaaaaataaatgtgctcggcgaacgccgcggcttcgtcctcaccccttgaacgctttccgatcattgtgctgacgggatgtgaatagcggatatgatccatatccatgacgacgatgtagtccgcttcattgatgatccttatttcttcgaccgcatggcgcacgtcttccctttgttttttctgctcgagggcgcgtttgacatcggtcatctcagataccgtccgcgcggtattcatcagccgttttttcagctcgcgctcctctgtatgctgaatattgccgatcagcacgatgccgacgatcaaaaaggtaaaaagcacgacgatatacgaaagtatggtgattttccagcggatggtgagcttttttttcgtcattggcctcttcctttccgtctctttacgaaaacggcccgcccgattatgcttgttatagaaaatggcggagggggttttcgatgaaaagcttgctgacttgtctcagcctgatggtactcggtatcggaaccgctttattcatcggctttcatgatcgtttctcaacggaagaaccgtattatgatgacgaacaggaaggcctgaaagatcaaatcgttttcaaattcagccatgtcgttgctgaaaacacgccaaaagggcgggcggcgaataagtttgccgacctggtctatcaaaagtccggcggcaccattaaagtagaggtgtttccaaacgggagcctctattcagataatgaagaaataaacgccctccaaaacggggacgtgcaattcatcgctccctccacctcaaagctcggatcactgtctcccgaatggggtgttttggatctgccttacgcgtttacaaactataaagccgtgcaagaaggcctgaacggcaaaatcggcacacgcctgttcgcttctttagaaaagcatcatttgaaaggtctggcgtactggacgaacgggtttaagcagcttacgtcaaataaagggccgatcttcactccggacgatttgaaaggacaggcgctcaggatcatgccgagcagcgtgatcgaagaccagtaccgtctgctcggcgcgcgcccgcggcaggattcctttaattccacgtttcagctattggaaagcaatctcgtagacggagaagaaaatacgatttcaaatatctattctaaaaaattttataatgttcaacattatttgacaatcagcaatcacgggtacctcggttatgccgtgatgaccgacgagcatttctggaattcgcagacagaaaaaacgagaaccatcttaacggaggcgatgagagaaacgacggagtggaacgaagcctccgctgagaaaatgaataaagaccagcttgaagagataaagaagaattcatccattcatattcatgtgctgagcaaagcggaaaagaacacatggatgaaacgcctcgacccgatttacggacaatatgaacaggtgatcggccgcgggcttgtgcaggatttgttatccttgcgccgcgagccttagcaggaccaatacgcccatctccgtttcatcccttttcccgccggggaagtaaatagggacagagcaaaaaaaggagatggagacatgtttacacatacgaaaaaactgcagcatccggctaaaccggatcgtcctgacccgctgttcgcaaaaaagatgcaggaaattttagggggacaatacggggaaatatccgtcgccatgcaatatttgttccaaggatggaatacacggggcaatgaaaaatataaggatcttctgatggataccgcgacggaagaaatcggccatgtcgaaatgatcgcgacgatgattgcgagactgttagaagacgccccgctggcagagcaggaaaaagcggctgatgatccggtcatcgggtccattttaggcgggatgaatccgcatcatgcaattgtctcaggactcggcgcaatgccggagagcagcacgggcgttccgtggagcgcaggctatatcgtcgcaagcggaaaccttctggcagacttccgcgccaatctgaacgccgaatcacaaggaaggcttcaagtcgcacgcctgtatgaaatgaccgatgataaaggcgtgaaagatatgctcagctttttattggcccgcgataccatgcatcaaaaccaatggcttgcggccattaaagaattagaagaacaggaaggcccgatcgttccttccacattcccgaaggcactggaaaaacagtcattctcccataagcttattcatttctcagatggcggagaaagcgctgaacaaaattggctgaaggaaacagcgccggacggagaaccatttgaatacgaaaaggaaccgaaagcgcacggcgaaatagctaagctggatcctgtcccgccgtatgtccacaacacgcttcccggacgcgagtaaagacacaagcccaaaacaaactgttttgggctttcattatgccttctgaaccgtccagtccggttcgtatcggatgtccgggtgatgtaacagctcgtgaatgacaggttcatcctcttcatacagcatcacttctattgaaagaatcgctgccttctgctcgttttcttcgtatatgcggtcatgttcgttctccataaaatcatcataggcctgtctgttctcccaaacgctgatgatctctgcgatgaacaggccgtctgcgtttttccgccacccgccggcctgtttgacgaagccatttacacatgataatgctccccaccttgactgtgcttgcgcaaatgcttcagcgtttgcagcgtctgtttcacatacaatttttttgatcagcatgacgttcctctgtgatgactgttttcgcacgcgtatgctcaacacacagattcacggttctgacgtaagagcgggtgcggtgaatcgtgcctttcgggatgagcaggctgtcatttgctttgagcactgcggtttctttgtccttaaaatcgatcagcagctccccttccagaacgatgaaccattcatctgagtcagggtgatggtgccagtcatattctcccgtaaacactgcgaggcgcacacagtggtcattgatctccgcgattgaaaaattgtcgtgtttttctttgactttattggcgatagcgagcaaattcagcatgtcagacacgagtgaaaaacccctttttcatttattgtatcgcaacggcggctcagatcaagattttcccaaaataaaaagcgatccagctgatgcgccggatcgcttttgatctgcaggttgtctgccttttatgcttttattagctgcttcgtctgtttccgcctttttggccgatttccttataaaaatctttgtcatgatttttgctagtggcttctccgcctttttggccgatttcttgatagaattccttgtcatggttattgctagtggcttctccgcctttttcaccgatttcctgatagaattctttgtcgtgatttttgcttgtggcttctccgcctttttcaccgatttcctgatagaattctttgtcgtgatttttgcttgtggcttctccgcctttttgaccaatttcctgatagaattctttgtcatggttattacttgtcgcttctccgccttttttacctgcttcttctctgctcattttgttattatcttgtgccatttttgaattcctcctttaattggtgttggttgttggtttcccgatttcagaactgctaaacaaagaaaacacattgaatgtgttcgggtggttttttatcattctgtatccttcatgcgttttagaatccggcgttttttataaagcatgatgcctgtttccgcgatgctttctaaagctgaacggttggcggacgcgccgaagatgatgcctgcggccggaaccatttgcagcagttttttcgcggcgaacgtatcgcgatagctgtaaacgacttcccgccagccttggatttgcgaggcgacgcgctgataggcgcggtcgttttgatcatattgccgtaaatcttgcaggatcgctttttttccgatgacgtcactggatgcaagctgtagcaatttgacgataaacacgcgttcttttttgtctttcggatcaaagccgtaagcaaccgcgatatcctgcagcgtctttaaggacaggccgagcatcgccggaatgtctgccgccagcgtgaatacgccgccgactcccgttgcggctccctgcaccttcgcggcctttacgcttgtacgcgctatggcttctgcgatttcgtccatgacggcaagcggcgcattgcggatgtcgtgaagcgtttgacatgtaccgtgcggcagccgtttttgaaactttttcatgatgcgcttttctgatgtcaggtactgtccgcctgactgaataaacgttcccgtttcatcgagaatgagtccgattttcctctgaataaattgcggtgtcagcttgtccaaaagctgaaacggcaagcgggtgaatgtttgccagaacatcaccctctgctgcgccttttcccatttttgaatgtctctcagttgtctttccaggtctgtccgctcttctgtcacccgtcctgcacgtcctttctgatttctttcttcatagtatacctttatggcgttttctttttacatccggacggattttttatccggaaaacatcccattgtttaatttccttcaaattctgtatattgtataattttgaataatacgattgaaggagaatgttgaatgcaatggatttatttaagtttagcgatcatttttgaagtattgggtacggtcagcatgaaattatcaaatggatttacaaaacttgtcccaagtattttattattattgttttatatcggcagcctttgttttcttactttgactttgaaatatataagtgtctccatcgcgtatgcggtctggtcgggaatggggatcgtgctgatttccgtgatcggaatttttttctttcatgaacagttctctgtcataaaagccgtctctgttcttctgatcatcatcggtgtcgtttccttaaactttatttctgaaagtgaaacgtcatcaaacggcatcagcgttcatacggacagaaacagatgatgaaagggttaaaggttctcttcctcattacagatattggatttatcgtttattggattgttactttttttgagtggattccaaaaaacatggtgtttaaagattatgataacgccatgatcatggcctggaactggtcattctttcccttagatattttcatttcgataaccgggctgtacagcttgtttctttataaacggaaacatgcgttatggcgctctttcgcattaatatcacttgtgctgaccttttgttcaggcctgcaagcgattgccttttgggtatttatcggtgattttgatcttatgtggtgggcattcaatctgtacttgcttctttatcctttatattttattcggaaattgctggtctctcgtaaaaatagctgtcattctttttgatgaggcggttttctttttcttcaggcgggaaacacttttcataaaggagtgatagacatgccttggtctatgaaggattatccgcaatcattgaagaatctcgaggaacctgtgaagaaaaaagcgatcgaaatcgcgaatgcgatggtagatgagggttatgaagaaggacgggctattcccattgcgacaagtcaggcgaaagagtggaaaaaaaacgcttctaaggaagaaatcgatcagctgatggaacacgatgatgaaacgaaacgcggaaattgaatcggaataaaggaaaaaccccgctctcaagagaacgaggtttttctgattataaaccgtaataataggataaagtggtgactgaaacgtagcctgtcgctcctgcatacgtgaccttcagccatttattggaattggtgtagtggccttgaacatattctccggttacccaagaacctgtaatttttttaccgcttgagaatgttgtgatcgttgaacagctgaccttagagcatgagcgcatattagcaccgtaaataccgactgtgcccccgctggctaaaatggaaacgtccggttcagctttaggtttgaaagctgctgctgatgcagagccgccaaaagcgaataaagaaacagcaaaaatcatggctaaagaaatgatcgacaaacgacgtaccaagaaaattccccctcttttatcatatggccggaaagctttcctgacgttattatactttttcgcccgggagactgaaataagtctaatgctccaacttcttttcttcgcaagtgaccatgccgattctttttttgatagataacagcggtttattagactggaatcactgaaatatcgttgattcaaacgtttattcagagcggccggagtttttccggaggtcatttgaatggtacagagaggttttatcttccaatggaaagaaacattattattctatttacccgggaaaacggaggaaatacagcgtctttttctcaaatcagttgggcggacagaaagttgtgaagttatataggcaagtgtcctcttttcacctttttaaaagaacgctccacgcatccgcgcatgatccgacgcggaaacacgctttgcgaacggcatcgcttctttcccggaacgatgccgttttcattttcggacctttcttcggcgggatacatatcatagataaaacagggcatcaatgtgccggtttattgaacataaagaacttgacatcttataatagcggatttatgatgtagataaaataatttgcgtctaggaaactttttgttatttagctaaaaatctatcggaatttaggtgagacataatgagcaaagacatctcagcacaatcactgcaagcaaaagccgtgcaggatgcacttgacggcaaaagcaagggattcaagcggcttctgccttttttaggccccgcctttatcgcggcgattgcctacattgatccgggaaacttcgctacgaatatctcagctggttcgaagtatgggtatatgctgctgtgggtcatcctcttttcaaacttgatggcttttttaattcaagttctttccgcgaagctcggcattgccacgggtaaaaaccttccggaaatcgccagagaccggtatccgaaatgggtatcagccgggctgtggatacagggtgaactggtgattatggcaactgatctggcagaatttatcggggcggcgctcggactcaacctgctgttcggcataccgatggttgaagcggccattatcgcggcgatcggatcattcgcgattttagagctgcagcgccggggttatcgggcgctggaagcgggcatcgccggacttctgttcgtcgtggtgatcgccttcgctctgcaaaccttctttgccaaacctgacgccgcctccgttctcgaggggctgtttatcccgaaaattgacggaatggacagtgtgctcttggcaaccgggatactcggcgcaaccgtgatgccgcatgccatttacttacattccgcactgacacagcgccgtgtcgtcggaaaaacggatagtgagcggaaaaagatttttagattcgagacgattgacattctcatcgcgatggtgatcgccggggcgattaacgcaagcatgctcatcgtcgctgccgcgcttttcttcaagaacgggctgtatgtagaagatttagacgtggcttatcagcaattcggccactatatcggaccggcttcagccattctcttcgggatcgggctgctggccgcagggctttcaagctcttctgtcggcacattgtcaggcgatattatcatgcagggcttcatccgttaccgtatcccgctttatttgcggcgtttcattaccatcattccgccgatgatcatcattatctcgggggtcaacgccacagaagcgctcgtatggagccaggtcgttctttcattcggcatctcctttgcgctcgtgccgctgattatgtttacaagcaacaaacgcctgatgggcgccctgacgaaccgaaaatgggtgacggctctcgcctggctgattgcggttttggtgatcgcgcttaatctgtttgtgatctacgattcattccgttagaaaaaaaccggccattgcggccggtttttcttttgacgccgggtgccgttcgtatctttttccgggcgtttttggtatgatagaagaaaaatcggagttttgcttatgtcagtatttatccttttttatctgtggattgtgccgattgtcatcggcatcttctgttctctttttgcttatcggacaacgggtaagaaacgtctgattcccggctttttgatgatcgcattaagcatcgtttccttaatcacggggctttggatcggcggggtgaactatcatgtgttcatcgggggcatgtttttattcggtacgttattggccggctccgccttcccgtttttcttcgctctttcacgcaaacgaaaataaacaggcatgccgcctgtttatttttattcattaaccctaaattataaaccgctccgataatgtgattccgcctcaatcagcctgtacatgtgttatataggctccagcccatgtcccatctcatcgaaactgcagccaaaatgaatcctactaaagaagattttgaattataagaaaaatactgtattaaaatcctatttaccccaaaaatacctattgatagaatggtatctgagaggggaaaatgttcaaagcggatcatatcggtcccgcctaaatacatagtctttcatttctctctacactacatttctaaaggaggatttcccattagacacgcagctaaaggcattctgtttgccgcatctttagcccttgtaactactgcttttgtccccgcatccttagctaaagaaaatcataataatactgccaatgccactggaacgaccaaatcatttttttatcagactgatacgcaattttcctacggacttaaagcacaaagcgatgcatctgtgtcaaaaccagtcaaagatgtaatcagagaagtgctgaaaaataaaacaaaattattcaatcttgttgaaaaattagcaggaaagaaaataagaaatgaactcgaatccgttttcaatgaacacatcgaaccggttttaaagaaaatgctgaacgagtatgtcgccttaagctgggctgacgtggaaaagaatctttatctttcacttaaaaagtccggactttctgacagccaggctaaaaacctcgctcaattgacaactttagcaatgaaagcattttaaaatcattcataaatgatcgtcaggaaaatacgtatgaagtaatgcaaagtgctgttagattcactctaatagcactttttcattggagatgtcacatgactgtcttttttactgttctgctcactttcttatgctgccttgtgatttcatctcttatttttatgattctattaaaaaaagagatcgtggatacaccgcccaaccgcttagctcatgcagcattcatcgtacttattggattctccctgttcttggctataactgtacccagcctagttatgtattttgcagctataactgtaaatcattttttcggagaatatatcatctatggttcactttcagacttatacatattttctgtcgtcgtaagtatcttagctttagtttatatgcttatccttacggcaattgtaaaaggaatgactcatgttttgacattgcctgcttggtcagcctatatccttgaattcatttttgcatgggctgctgtttacttctcaatccaatacgtttccaatcatatcattgagaacatatctatatttcaaggtggagaaattcttctttcattgttcatcactttcttattttcgggattggatatccttttcactaatttggataagatcacaaaagagaaattaggctaagggggtaacaaatatgagaatcatgacatatatatcctatttttctatttctttagttttgcaggtggtatggctgctattaataaaaagaacctctaatatatttctgatagatatgattacggtgtccttcttattcaccctctttatgttcatcttagatcaaatgttcaaaaataagcggacaaattagggactgttttttaataatcctcgggcttctctttcgttttgaaatgattccggatctagagatgttacggtgagccattcattaatgaataacaccagcctctttaaaatacttcttcttttatataacatcctgacttttccgtcatatattcatacgaaaaaactgcaatagggagtaatgaaacatgatattgtttattggcaagttcatgttgctctttttactctgttcgctggcgcattatttgtttaaaattgtttattacaatatagggaagaacattgcgcttaaaaccccgaaagggacaaagacaaaccggacggcacttgtgtttgtcaaaaatggaactacactgaatgagggagattactttatgatcgctgttgtgaccgctctctggctgttcttgagatgaattgcactggtccttcataagttttttgatcagccatcgctcgccagctgccgattttcacaatcatcgttttcgtttaggacggctatatgcaagcaagccgctcaacaaacaaaggagctgtcgagatcttctcgatagctcttttgtttgtccttgaatgattgaagataggcttaaaaatggacggcgtctttctcatgcatgcatcgttcaagaaaacacttcacagcaaaacggaaaggtgaacgcaatacaagtaacggttaagaaccttatgaggcagcgtatgttgattactggataagaaaaagaaatcccccagtcttaaaaggtggaggtcaaaaattggagaacacttaaatatttatagctttttcagcgatataaaaagttccagagtcactcatttcagcagtataaacatttgtcacacttaataatccagtaaaaagaataccgattaaagcggagctgattataagtttcttcattatatagcctccgtaaccttaagtatttgtgtttgggcatgtatggttttctttaaaaagtttcttccctctacatagtttctcttctcaaaatgaaagtcacctaatttttcggttagctctgcgaaatcagaccaaaggcgtttcttttccaagtaacctaagctttgtttcacttctgtttcattatattcttcttataatgaattaatgatttttaatttagccaaatattcttcttcattagaagtccgagcacgatttagagccgtttcataaaagaaacgtgcttccttggctttatcacattggtacaggacattcgccatcatatataatgatctcactccatacactgtatcaatatgttctttcacgtctattgcctttttgaaattctcttcagcagcaatcaaatttttccctcttaaataaactaagcctaagttatgaaagatcactccgataattcttttcactttttcctcatccaagccacgggcgatacttaatgcttcccgataatatgattctgcctccgtcagcctgtacatatcgtacatgttagcaccgaccatcatattacagccaatcactttcactttgtatagttgacttttttcaaacaattgcttggctttttttaaatgattgagggaaacaaagtgctgatcaatttgataataggcatcagctattttgtaatgaaattcagcttgctccatttcatctgatacagcattcaactctctctctgctttgcgataatagcttatcgcttcaacatactctttatgatcaaattcatacattccacgaaaaaacaatgagtaatatttcaagaggcctgtaagtcttttttgtggtttttctattttttcaagcagttcgtcgactgtagggcgatctctatatctgtcttccggctccaaggaatctaacatcaattggtgacgaaagcacatcaatgaataaaagacaagcaaatcctgatcctcttccatctcctctatttcctgttctacttcagcctttaaaatctcagcatcaggcacactgaactggcgaatcattttgtaccattcattgatcttgacaccaacttgggacgacggtaaaacttggtccacacttatccctccctctaatcactatttttgtaatattataacttttcctacaataaacacaaacgaaaaaatcccgcaattttcgtcgcgggatttttgggattatggttttgatgtacactcttgattattccatttaatattttcgctttgtaaaattcattatagtcttagtgattgaaccggagataaggcaggctcccgtcatgataaacacccaaattaaaaatgttggctctgcccctatcacaacaaacataaatatcaatgacaggatcaatacgacgacaaccatagtccatacttttttaaagatgaaataccctattatccccagcataaaagaagctgccggaagaataatgagtatgatatatgcagggctcaaaaacgggctaatataaacacctcctacttattttaaaatttcgaaccgggcaatttcccactctttttttgcttttagcgggattgtttttacctttttgcctgatttcaaatcataagacgtgatatctccaagcttgttatcacgctggatatcaaagtttttgagtaaaacatacatctctctgtcattgaattgaacatcattcattaatttgttatcatccccagcataaaaatcaaaagattttttcttaaccatttttttatcaaacacctgcagcttcccctcaaaagaaacagctaagatgctatcttttaatattttcaattttgcaggatgaaaccctttctccatctcgacttctttttttaccttaagagtctctctgtctattaatatgagcttagaattctctttctcattcacgttatcattaactgccagtacaaatgtattttcatctagagcttggaatgcatccttttcatccatgaagtatatccctttattcggtatggatgccttgttctcttgcttatttgtctctgggttaattgaaaggatggacatactttcttcatcacttgaaatgacataaattttatttttagcgacgattgctgatccaagttctccgtcaagctttatttgtttcttgttttttcggctgtttcccttccaatataccagttcactttccagccctttgtctgtatatccaacgttaatgtcatggatgatataaccgtcagaactatttataaagaaagcaccttcatcctcagttgtttttgacaaactcttttcatttattttgtttatttttccggttttattgtctatcatcaagtgattattgcttctatttgatgagaagaacgtatcgtttttgttatatgaagacatcgtgaaatttataccatctttcaattccaagctatccattttagcaccatcttcaccgtaaaccccaatctcacttcccctatctaaagtgttagaaaaaccaacaataaattttgcattgtcaatatcctttaatacagtctttttattgctgcttctttcctctttttcattcccagtttggatgagaccgcaagaggttgtgactatcagtatgcaaatgaaaataaacagggtcttaagtctattcatattttcctccctttgaaatgacaaaacaaccggtgcagcaccgattgtttttgtcaatttgtttaacccttgtgataaaagattgttgtgttattggattttacaagctccattggtgttacaacgctgtcccatttgacattgtcaatatcaataccttggtttttccaagaacgccaagctaattgagaacaataaaatttagcagttgtctttttatttaaaaagttgaaattatatttctttttattatctgcttgcttttccgcatattttgcagcgtttatatacttattgttattcgatcctttaacccatagaccataaactttctttttacttccccagttattattatatctgcgaactccatcttggtttatagggctccagcttttcgcccatgcttcaactgtttttgatttgttagttgaaacaaccgcagcatgtcctacaccaatagaccaacttccagaattaatttcatagcttgtaagaacatcaccttttgtacctaacgcttttgctgcaatttggttcttgggctgatattcaggctccttgtatttaggaagaacttcatcaatttgaccagaggctttcaattctttgatttctttttgggaacccttatacaagtcttctgcatgttcttgtacatacgcatactcttctttactcatttcatagaatttctgtacttcctcacttgtcatgccggcatctttcatttcctgtatttccgtttggactttttcattagtaagttgcggaaatccttcagcatgtgcacttttcccaaatcccaagcctaaaccggaaatcaacatagttgtagagaacatggtggtaagtaaaaatttactctttttcacgtcagtatccccctattgaatatttttccttcttttctaagatataggatataaataaggttgtaaacacctttttttaattatttaggatattttaatcatttctatctagtgcataatgacacaaaatcgggatatgcagtgccaactgaactataggatttgggttttgcacgatgtttatcaggcaatgtgttgtttcactatttcttcgtaaggttacccttcaaattttatacaaatttacaagtatttgaaatgccttccaacaaacacattctaccattgatgcgaaccacaattctatatacttctttatttttatgaaatatatagaattgtggtacagccctattaaagggctgtttcatttatttcagaagagacaacatttttgctttcgttttcggtccgtaaattccatcagcagttaacccgtacatagattggaatcgtttgactgcgtttgctgttttcggaccgtaatagccatctattccgttgttctttgctcctttgtccggatagtaataaagagccgccaaagctgtctggatctgtttcacggccgttcccttagttaaggggcttgtcactttaaaaacgcctgatggcagcgtgtaagatgattttttgccttttgttggagagctggccgagtccgtctgctttaatacttggccgactttgataaaattcgggtccttgatactgttcaacctttgcagggtcgccatgctcacgccagtttcctgtgcaatgacagaaagagtatcgcctttcttgacggtgtacgtcgccccgcctgtcttggtttctgtttttgctgataagggctgggcgatgcgatgtgcgaaccacgtttgttatgaactgtcctggtccttcataagttttttgatcagccatcgctcgccagctgtggcttttcacaatctccgttttcgtttaggacggctatatgcaagcaagccgcccaacaaaaaaataaacaggcatgctgcctgtttatttttttataaccacctgcttcttaaaacagccgttttaagcttttcttgagtgacggcatttcgattttttggttttcaaagaagtttttcagcatgtatttgctgaagcccttcgcttgaccgtaagtgatttttcccggaagcggcggctcgtcgccgatgacggcgtcgatgacgaccggctcatttgagttgagcgcttcatgaaaagcgggagccaattcctcgtgtttcgtcactttgatcccttttgccccgcagctttctgcaaaagcggcgtaatccatattttgcagctgggtgacgtagtcaatgttgcctttgacccgctgttcatattcaatcatgcctaaattttcgttgtttaatatgacaaccgtaatcggcagtttatatttaacagctgtcggcagatcctgcatcaccattgaaaatccgccgtctccgcaaatggcgatggactgccgctcaggttcggcaaggcttgcggcaatcgctcccggaagcccgcatcccatcgtggcgagccagcttgagacgataaagtcctgcttcttcattttaaaatggcgggccatccacaccgtaaccgttccgacatccactgacaggacggcgtcctctgcggccgcatcctgaagccgggcaatgacctgctgcggcttgagcggatgagtcgcttcggtttcatccttttcgatttccttccaccaatgcttcatgtgctcggtgcaggcgtccaaaaatcttctgtcttctttatattcaatgtattccgtcagctctttcagccccagagccgcatcactgacgattcccgcattgacgggatagcgcttgccgattttcgccggatccgaatcaagctgaatggcgggcgtatcatccgggagataatccctgtatgggaacgatgtgccgagcatgatcagcagatcgcattcctccattgcttcgtaggcgggctttgtgccgatttgcccgagattcccgagaaagtggggatggctgtcaggcacgacgccttttgccggaagggtaatgacaatcggagcggccgctttatcggcgaatgcgagcagctcctcttttgctgattttaacccttggccggcgagaatgaccggtttttttgcgttgttaatatattgcgcgcatgtcacgagatgttcttttttcggctctatatcagctttgaggtatatcggcgatgtgtaaaccggctcccgtttgattttttgcgcgaataaatcatcagaaacagttaaaacggcaacgccttttttgctgtaagccgtgcggatcgcctgattcagaagatcgggcagcgcttctgccgtatgtacttgctggttgaataccgccacgtcctcaaacatttgctctaatttgatttcctgaaagctgtcacggccgatttcatcggaagccacctgtcccgcaatcgccagcaccggaacgccgtccgctttggcgtcgtataaaccgttcagcagatgaacggcccccggtcctgcgattgaaaggcagacaccgatctggccggtcagttttgcctcagccgcggctgccagggctgcgacttcttcgtgccgggtttggatgaatgtcaggttattccgttcatgtctcagttcttcgataaattcattaatgctgtctccgggaatgccgtatatatgaccgactccccattgttcaagcagctccgtcattacgtgtcctgctgttttacttggcatactgcatcctccttttacctgtattcatcccctttttcatacaggttgaaacacgagctatactctcagcttttttcttagcagatcaaggatggataacagatttcggtctttaaggactgccttttgatttgccgccccattgagtccgtcttttatttgccgttttctgttcggcaccatgaacagcggcagccggtttggggaaaaccagcgtaaagcggcggtttccggcccgttcatcagcggagttcccccattaatggctccgatgaatacatgttgtgtatcttcaaatgccggcctttcatactcaccggctttttgcaggatggtcacgttataaccggtttcttcgaaggcctctctgacggctgcggcttcagatgtttcaccttcttcaatcctgcccccgggcaaatcccataagggaatgtcttttcgttttacgagcaatatgtcccgcccgtcattttgtatgatgacaaaagcgccttgtgccatgtcgtcctcctttacaaaaaagaccgcggcattttagcctgcggtctttgccgttactttttaaaatgatacggcagggtggcgacgattatgtccttcttccaaaacagccggacgcggagcaagaaggctgattggttgtgaaggatggtctgccagcgttttttcgtgatgaattgcggaaacagcaccatcacggagaactgttcttttttcgctttctgttcgaccgtttctaaaaacttatcaaacgggtgaaccagactgcggtatgaggaatgcagggtgacgaggcggacgccgttatgaagttcttcccagcgcttttctacctttttttcgttttctctgtcaaaggaaacatgaaccgcaatgacctgatctgataatgatttcgcatactgaatcgatttttggacgacggtggtgacaccggcgacaggcacgatgacgacggttccccttatttcctcaggctgctgatcaacgacccgcagctgttcgccgaccgcggtgtagtgatttttaatgacgaaaaacagcatgacgacagcaggcatgaataacagcaccggccagacaagattgaacttcgtcgcgaataaaatgcacagcaccataaatgaaatggcggcgccgcatgagttaatcagcatttttactgcccagcccttcggcttctgcctgatccacttgatgcacattcccgtctgcgacagcgtaaacggaatgaacacgccgacggcataaagcggaattaaatgttccgtgcggccgccgaataaaagaatgagcaggatggacgcgataccgagaaagatgatgccgtttgaaaagcctaaccggtcgccgcggaccgtaaacattctcggcatatactgatcgcgcgctaaattaaacgccagctgcggaaatgcggaaaagcccgtattcgccgcaagcacgagaatcaatgatgtaacgccttgaatgaaataatacaccgtatggcggccgaaggtttccgcggcgatttgtgaaataacggtctcgttaggcttcggacccgtgccgtagccgtacgccagcaccgtaatccccgtaaataagatcgccagcagaatccccatcatggccaaagtgcgggccgcgttttttgccggaggatttttaaaggccgggatcgcgtttgaaatggcttcaacaccggtcagcgccgaacaccctgaagaaaaggccttcagcagcaaaaacagcgtgatgcccgccacgggcgtgccgattggtgtatgctcggccggatgaacctggcccgtcatgagtttaaacagcccgacgacgatcaaaaggacaagcgccgccacaaacagatagacgggatacgccaaaatggacgccgattctgacagccctctcaaatttaaaatcataatcagaatcacaagcaaaacagcaatgagcaaatgatacgggtgcagggccggaaatgccgatgtaatcgcgtcagttccggcagaaatgcttaccgccaccgtcagaatataatcaacaagcaatgagccgcccgcaatcaggccgggcttctcaccaagattctctttagaaaccatataagcgcctccgccttgcggataagcgtaaataatctgtctgtaggacagaatcaaagcaagcagcaaaatgagaacaccggctgcgatcggaatggaataccaaaacgcggccgcgcttaccgcagccaaaatgatcagaatctgttccgttccgtaagcaactgatgacagcgcgtctgaagaaagcatggcgagcgccttgagtttcgtgagtttctgctctccggcagcctgtgatttcagcggtttcccaatcaaaaatcttttgattgaatggtacatttgttgtcttcccctttttttcattttccgtttgatttacaaacccttactgctatgatgtctccgaatgctgattgcatgccatatttcagcacagcaaaaagacacagaggcaaacggatgcccctgcgccataatcgtgcacaggtttcattcatctcctctcatgaacgcttacgaggttagctgtcggattcgggctgatgagagttggccctacctgaaaaaggattcaccccaagcggcatcacgcgccgcaaattggttcccccgctctgattacagattaagcgatatagattataaaagagatcatactcccgtcccgttcagttgtaaaggggcttttatgctgtttcaaaaataaaaaaatcaccgccaaaaatggaaataaaaatacaaaaaaaagaggcctgttaacggcctctttttccatcattactcttcgcttttttcatgatccgcttttctttttttccttcttgccgtcagccagatcagaccggctgcaatgatcataagcgccgcgaaaacagcaatatacgtaacgttcagtgctgcggaccggctcttcgtatcagccgccggactgctgtcatcggacttgatttgctgatgattcgaaaacagctgtcggccggctgtttcgttaatgacagttgcggcatcgcttgtgctgtctaaaaagctgatcagctcttttgtgacagacgcgccgcttcctgataacggagcaaaaacagcgatgcttcggccggagtcccaaggtgattcctgggtaaacgcgacttgtttcgtcgtctcattcagcatctgaaacgaagaaacatcgtacgcgccgctgcggtctgacggcacgagaagcttagaggcgtttgactttaaaagcgggatttgcggcaggcctccgataaacacaacattccggcctttggcatccgcttccttcatgtctgatgccgtctttacggtaaagccgtttccgaatgaatccgccaccagagaaagctctttcagtgtctgcatgtttacgtcatccgggatgacgatcactgttttctctttcccgccgcccgcaaacgggagcggccattgcccgaaatcagctttctgcgccgcatcgcttaccggatacgtcagcgtgctgcttttatcaatatagacccatttgttttcgtcacggtcgacacacggattgttatgtttcaaacctgatgtgacaaattgcagatcaatgtacctgctgcttcgcaaaagcttcggatcaatcgggatggagacgtggtaaaagccgtctttatctttattgccgagatcatcaagacgcaccgcattcggctgtccgttgaccgtgacgttcagctccgctctctcggcgtcatttgctgaatccgccttcgtccggatcgattccgacgtctttaatgtaagtgaaagcttgaccttaccgtctttatcaacagcggccgccgcagggtaaaagaagtgctctgacgccgttttgtttgatccgaccgttacatttcccgcgccgaagtcctctagtgtcagtttattgcctgtcttttccgcagcgggctgaaggcggccgattgtcaaagtatctccgcccagctggcttgaataagcgctgtctgtgatgacgcggattttatccgccagcgttttgtctgattgcgccgtgacaaacaggacgggctgacgtttgttccctgatgtcagaacccgttcagcgagaagaagtttgttgtcttccgctttgatgttcccccgttcgaaaagctcgtttattttcccgttccaatgctgatcagcgccgatgacaattgacggattgctgattttgccggcgtcggattcttttacataggataccttcagcctgctgtctgccgttttcagaaatgcttctgttttgactgcggcttcagcttccgccgaggtcggtttgtcaggaaggataatatcggtttcttcacccgtattgcctgattgggcaaacggatacgggaaatggccgagatccgctccctttgacttgcttgcttctgaaagcacaaggcggctgtccggataaatttttatccagttgcctgacgtatcctgcctgacgcagacgccctcttttaatacgccgtaaaatcgtaatgatacattgtgatagccttgggcggattggcttttgctgagattgagcttcaccgttttccgcttggaactgccgtcaagctttatggatttgacgggttcatcatcaatggcgatggttaaagaagacggggcaattaataagtttgacgcctcgtaatcaatcagaagcgactgatccgcattcgaagctcccgcaggaatctgataggtcagctctgcgctgtctttcgccccgtacagtgtcatcagatcgccagtcagcgcctgctgctcttttgcgccggcgcttgttccgagggcggaaccgtccgttttcagttcccgggccgcggccgcctgcccgttatacatcaatagcaaaaggccagttatcaatatgatcgcttttttcaaaaaggtcacccgcttttattttgattgtatcgctccgttttgtaccacttgacttcctgcttgaacaagcggtgcttgatctctgtgaataatgaccagatgacgagcacgatccaagcctgggagtatgtaaagtacatcagaaatacgataaagaagttttgtttgttcatttctgttttttcaatgcttaaagtaatcatgacctcagtcataaacaggaaaaaggccagtatccacaaaatcatcgccaaaaacccgacagccagatgcaggtcgtaaaaaagattgatgataaaaatcgtgtttgacatgatcacaccgaagaaaaataaaaaatacgtaaaaaagaaataaaacagatcgaagatgatccgcttgcgtttcagcttaaaaaattgggataaaaacttgagaaccacgtattggttgccgcgcgcccatcttgtccgctgacgccaccacaccttccatgtctcaggctcctgctcccatgtcacagccgccgggaaaaagcggatatgatagccgagattatacacgcggatggtcagctcggtatcctccgccagcgccttatcatcccagccgccgagccgttcgataatgctccgcctgatcgcgaagttcgttcccgggatggtggcgattttgaaccatttccatctgccgccctgcgccatccactgaaagcagatggtttcaatattgataaacttcgtcaggatcgttttggccgcgttgatgacacggaatttcccgacaaccgctcccgctttctcatcattcatcagaccgagaaccaggtagtacaccgccattttttccggcgtgttgtccgcatcatacacgcagatcacgtctccgttcgattccgcgaaccctgagttcagcgccgaagattttccttttccggcgttcgggggctttgtaatgaccattttaatgaagtcatactgacgggaaaattcattgacgatgtctcccgtccggtcggaggagttatcattaacgacgatgatctcaagcctgtctttcggataatacagattcaccatcgccttcagcgtctgcctgatgacgacctcttcgttatgcgcgggaatgagcacgctgaccttcgggagctcccccatctttgcgcgccatttcggaatgttccgttcgaaggtcatataatgcctgaatccgccctgcatcagaaacatgtgatagagaagcatcacccatattaaacttaatgagataaaaaacagaatgttactcaaggcttcttctctccttaaaaattcgtttttttaatgtggcgcgcaaataaagaacgtagcaggcgaacatgatgataaacaataacaccacgccggagagaatccaaagcgctttttccagaggcgtctgctgatggtgattgaaaaaggccgttatcggatgaatcttgttttccacatgaatggttccgtctccgtccgttttgatcctgacgctgtccgacgttaccgtttgcttcgttttcttcagatcgagccactcgccgccgggaatccgctccatctgattgacgagctcggggaggtacttcatgccgagatacggatggtagaaaccgcccgccactccgccgccgaaatcaatcatctgcgaaatatgattctccatatctccgagcggattttcctttgagttatcggcataaccgattgtttcagggtacagcgtcatcccgtccagcatagccggctttgagacgaacggaggggcgcccgaggttttccacgtcgtgccgctgagctgcacttgtccgaaaatgctggagaaataagaagatgcgattttgtagccttcttcagacatcgtatagtgcggcgcttcgaatgacagcgggtaaaggccgagctctgtcaaatcgtcaatcgcctgcttcagcttcgttctcgtgtagattttttctttttcacggaaaggcttcacatacgcccggtacgctttttcattcggaaaatcctgttccttttcaagcttgaccggagtatcatccgcattttctgacgtaatcggctgatccgctttggcatcccaaaattcaaagccttctcccgtttcgctgtatcggtatgcgtgcgtgtagccgtgaataatgatgctgccgcccatttgctgaagttttttcaggacgctgaccattttcggtttgtccgccaagtatactttttctccgttttccggattgagatagaccggaatgaccgccagaataaacggaatgtgtcttttatgcaggtaagcgcccgcttcgtaaagcaatgtttcatctgacatcggactgatgtcttcaagccgtaaataaaggagggtgccgcccgctgattctccgaatgcgttgcgcagcgctttcgccgtcagaaacgaatcatttaacaggctcgtcacaccgaaataatagtcagagcgcgccgttttccacataaaagggcgggtgctgccgtcaccggaccggtatgtataaagggactttccttttactcccgatacgccgagcacggacatccctttttcaagcggcatgtctgttttttcttctttgccgtaaatgcggtataccgtttctttctctgtcagggacaaacccgcaaattggcggaactgtccggcgttatagccgatgctgataagctgctgcggcatactgctgatcagagacacaaatgatgtgctgagcttttttttcgtgacgccgtaatagatgacgcgccgattctttttgaggtccgcggctgtgatgtctccgtcgcttttcacggtgacggcggatgagaaatggcccgcggtcagatcaagcattttgacctcagcggtttctttgccgtccgtgcttgtataaataatgagaatgccgtcctttttgtcttttgcttccgccgtaaggggaacataaaccgccgaaatcatgaagagcgccgagagtaagagacgtatccatttagagttcattcatcatcatctcgttttccagttcatttaaaaattgctcagccgtttgtaaatcctttcggtacgccaagtaacatacacggaaggtgatggagacgtatttaccgttttgcagccggtacgtatccaattcctttttcagcttcgccagaacggccggcatgttttcttcaggcgtatgggtcagcacgatgccgaaccgttcggcggacggcctgaattttttgtctgtttcccgaacgcttgaccggatttggcggctgataaatgccagcaggcggtcggtctctttttctccgtagagggatttgaattccttgaaataatgcatgtgcagcagcaaaaagacgaaggaattgccgtagcgttccgcccgcttgatctcctcggaaagctccagcttcatccgcagatggttgtcaaagccggtcaccctgtcgacggcgacaaagctcgtaatctcttcacgcagctgtttcactgagcgctcaagccccttcgccaactcgtgaatccttcccgctatgtaagaaaagagcagcagcgcaatcccccaaatgaccagcacctgcagactttcggcaacggcagacgccataaagctcccggtctgaaaccacaggagcaggctgccgagaacaaataagacgagtaaggtgatgacgagcgcgtagattgccccgaaccatatgccggctcccgtgacaagcaatgtgatgcaggttatcagaagccctgcggattgctgagacgcatagtaaataaaaaaagacagcagcaccagcataactgctgtgtagctgcacagtttttgtgattcattgaatgatattttcattaaacaatttcctttcagccagaagcggcagcaggttatcgaaagaatgtgtatcgcccccgctcatatagccgccgtaatcaggtttcagcgtgtccagtgtttcaaatgaagtcattctttcataaagcggcttgatgacagccggatcagctttttgctctgctaaaaaaagaacggccagggcgtaaacggacggtgattcgtattgaaccgccggctccttcgtgtctgcgctgtatcgtccgtacagctgtccgcgcgtcttaaattcctttatcatccatttcgacagcacagcggctttgccatcgccccgcttcagattcacggcggcgtacagctggtcgatgacattgacttcgctgtcatatttgtattccttagtttcggtattgaacgatttcggcaaaaaaccatttttcaggggcgcaagattgagaacatcgaggttccggttttccgttttctcctcgataatccccttttctctgagcatctgtaaggcgccgggatcgacgtaggacaacgtcacggtctttgacgcggcatttgaagcggcatcataataatccgtaaaatacccgtcattcgtattgtatttttccagcgccttcccgatctgcaccgctgttttcccgtattcactgtttccccatagggttccggcctcattcagacagttcatgattctgaaatcgtcaattaaggcattggcgccgctcgctttattcccgtcaatcttccacgacacgagctcatttttcgtcagaaacgaatcggtgagaagctgatattgcgcttgaaactgccgttcatctttcctgttcagcaaaaatgccatccatagtccgagagactctgataaatattccggctcaccggttatgttcgtccggatcatcccccgcccgttcatcaatttatgataaataaaatgctctgcgggctgaagcggtccggacggttcggccgccgcctgtttttcagtgccggcctccgcgcaccccgccgtcagaacgatcgaaatcaaaaggatcatcagacgaaaaacgaattgcttcacagtctatcctcctattttataaacccttttttagacccatatcttattttttcacaaagtatttttactatataggaaacgataaaagaatactagcattttttcacattgggaaattttaaatgggagcgccgtctgctcaccttttccctcttcgtctggatcgtattcccattacagttaaaaacacaacaaaaggcagcatttctttacaaatgctgcctttctctgatctatttatccaggccgagttttttcagctgttctgccagcgcgttgttcatcggctcctctttgttttggcttttcatataagagttgatgtcccgcttggatgcgcgtccggatttatctttcgccttgcgcttttcaaagacggacagtttctcccggtggccgcatacacatgcgaaggtttggccttcgccctggccgcgaagctccattttcttatgacagttcggacagcgggcgtttgtttttcttgccagcgttttccggctgccgcactcacgatcctgacatacgagcatcgtgccgcgtttgccgttgactttaagcatcattttgccgcaatcagggcaggcggtgcctgaaatgttgtcatgtctgaaagtctggctgctgtttttgatttccttcaccgttttgcccgcatatgttttcatgtctttaatgaacacggcggatttcagtttgcccgctgcgatggcggagagcttttgctcccactcagcggttaaggccggtgattttaaatcttccgggacgagctgtaagagctgcttcccttttgacgtgatgaaaatatctttttcttttttctcgatcaagaaactgttgaacagtttttcaatgatatcagcgcgggtggccactgttccgagtccgccggtttcacccaatgttttcacaaggttcttctcttctccctgcataaaggcgcttgggttctccatcgcggataacagcgtgccttcattaaagcgcgccggcggtttcgtctgtccgctcgtttctttcaatgatgagacagtgaggcgctgaccctgctgaagatccgggagcgtctggtctttgtcttcctcatgatcgtcgtcatcctcgtacatatcatacacggctttccagccaggcgattgaaccgttttcccttttgcggtaaatgtttcgccgccgatattggctgtgacctttgtttcctcgtattcgaacgccggcattaacacggcgagaaaacgtttggcaatcaggtcgtaaagctttcgttctttgtcgctgaggcttgaaaggatcagcggctcctctgtcggaataatggcatggtgatccgatactttcgcatcattgacgaatcctttatgcgctttgacgccccgcttcagtatttgattgacgtactgcgcgtacggcttaacttccatgccgtttaaacggtcttttaaagtcggcacgatgtctgcggaaaggaatctggaatccgtccgcgggtaagtgacaagcttatgctgttcatacagcttttgaagcacggacagcgtctcttttgcggagaaaccgaagcgcttatgagcgtcccgctgcaattccgtcaagtcgtaaagaccgggagcgaagcttttcttcgccgtttttttcaattctgaaatgactgccggctttccttgcaggtcttttgccaaacggccggtcaccgtctgatcgaatgttcttgtctgctttgtttttttatcctgccatgtcagcgtcatctgatcagccgccgcgcggagaccgtaataaggaacgggtttgaacgcctgaatatccgcttcacgcttggcgatcatcgccaatgtcggagtctggacgcgtccgcatgacagctgcgcgttaaattttgtggtcagcgcgcgggtcgcgttgatgccgacgatccaatccgcttccgctctggcaacggcggaatgatacaggttttcgtactctttgccgctgcggagcttttgaaatccttctttaatcgccttatccgtcacagaggaaatccacagccgcttaatcggtttgcggacgtttgccttttcgataatccagcgggccacaagctccccttcccgtcctgcgtctgtagcgattacgatctgggtgacgtctttccggacaagctgagctttgaccgcattgaactgttttcctgtttttttaatgacgacgagcttcaaaggctccggaataatcggcagatcctcaagccgccatgattgaaattctttgccgtatccttcagggtcagcgagcgttaccagatgtccgagcgcccatgtgacgatgtagcggtcgccttcaagatatccgtttccttttttatgacacttcagaacgcgggccaagtcccggccgactgaaggtttttcagctaatacaactgtttttgacatgcttttcacttctctttctttcacaatcatcctgttattataacagacttcctcacgctctctctaatcgaggacgttttttgtgtcaatttctgagaaaatgacgtgggtcacggtttgggcatacggagaggtgcggttaatgaagtgttcgatcgtttccaggctgtccgcgttcatcttcagcatataacacgccgccccggcgacccgaaaacaaaattcaatgttgggaatggattgaatgtaggttttaaattgatcgtattttccgtttttcactgtcgcttcgacaatgcaggaaacaggaagcccgatctttttttgatcaatgtccaatgtatagcgcttaatgacgccgaaggattcaagctgtctgacacgctctgtgacggacggagctgacaatttgatttttctgcccagttcccgcatggacaggcggctgtcccgctgcagctctttgatgatgctcagatccacattatctagtttcatgactgtagtccttccttacccttttggctatattatcaagagaaatccgaaaaatgacaagaacaacaggctgaaatcatgaaggttttttcaggaacagacgcgaaatggtcatattaggactgccctttgcttatagtatagaggaaaaaagatgtccgacaggagggagctgtatgttacacacgccgatcggcagacttcgcacgatggggtttattgaaggaatgtcgcttttggtgctgctgtttatcgcgatgccgctgaagtattgggctcatcatccgctcgccgtcaccattgccggttccattcacggcggtttgtttatcatttatctggcggtgctggcgtatgcggcgtttactgtcaaatggcatgtgaaatggtcagccgccggttttatcgcggcctttattccgttcggtaattttatttatgatcgcggcctgagaaattatcaataaaaaagctcctcttctgcagaggagcttttttcatgcgttagttacatccatttcgtcacccaggcgatataataagcgccggggatgaatacgagctgggcgagaagcgtgcccgccacccttgatgtcaccatcgtcaatgatgtccattttaaggagacgtagctgcgcttgcccttcgccacatcgtctgccagtacggatactttcgggtcaacaaacacagccaacagcatagtcgcaactccgttgattaagcctgatgccatcacggcggtcgtgctgtgctcaggcgccagaaggccggcgtacagagcggacagaacaccgatcgtgtaaatagacgtaatgaccatattaatgacaaacaagcgtttcggaatcattcggaattgaagcccttttaaataggagactgacggcagtctgatataagaacgcgcatgcttcagcccgttcagtgaaaatccttttttaaatacctgcatgacggagcctcctccgtccgccaagtgtataatcgccctggagaataacgcgacgaatgtcggcaaaagacagatgccgagcatcgttccgaccgtggagccgaatattaaaaatcgaaactgggcgcccacaagagacagggcgtttgatccggcggcatcaatcagatgtccggtaaacggctgctgaaccatgtttgacatgcgcgacacgatgaccatgacattaaataatgacagcgcggacgcgataaaaccgactctcgcgccggaaagccgtgttgcataggcaagcgtttcaatcgaatgtatcagcaacagaaaacagaagataaacagtacttgtgaagtaataacgtgcaatgtatgattcctccaaatcttttctactgattagactctgcagactgcggcgaggtttcggccgtttacataaaaaaaccgcccggatgtccggcgcggttttgtcttattcttttcttacgcaaataaataatatatggttgcccgccttagcccgcgggtgattcgtattaacagttccgacagaatcattcttcgaaagtaaacaccatggaagttcttgaacacaagacaacgaaagccctacctctcaatcgtcactgcggctccgaagccgcgccggtgtgaattgtaaaacaaaaagtcttttttccatctcttcgttaggggcgaatgtcagaaggaaaagaataagctcagctttttttcaagctgtccgttgaagcctgaagcttctatatcaaaacagaaaaaagaagtttactttcttttttatttgcatgttgtcacttagcaattaagtataacagattgcccctgaataatcaaatgatttattaaagttccagctcggccggcgttttttcacccgcgttcatgagcttgatctgcttcggttcaatttcaagaatcaccaggttcggatcgtcttttccgtcaaaccagcgttccagtttcggatcccacagcttttcttttaaatcggctgagttgttcagtttggcggttccggccacttccacataagcgtctccgaatccttcacagtcataccctaacagaatatgaacattcggattgttttcaatttcttccgctttatgagtgtctttgctcgtcggcgtgtaaatcgttaagccgtcatggaaaaatgtcatgtagcgtgaatgcggtttgccttgctctaccgtcgcaagcgaaccgactttatgatgatccagtacttcaagcactttttctttgatttcattttgattcatgaagaatcactcctttttaacgtctccgcttttacttttccacattggggagacatttaaaccaagaaatgtgctcttctgccgatcttcgctccattcccgcttcagcatgctgtagttcaccgtgtcatgataggcgccctgtacgaaaatgccttctctcgtcagtccttctttctgaaacccgagccgctccgccaccgccctgcttttcgtgtttttttcagccgcgctgatcataatgcggttcagcccgagatcctgaaatgcatgggtgatgaccgcccggcagcttgcggtgataatgccgaatccttcatgctctcgatccagccagtagccgatctctgctttttgattgactggatcgacattatggatgctgatcatgccgcaaaaccggcccttcacaaaaattccggcgtcaaacccattctcttccgcgtatttatagcgccattcggggatgatcacatcgcggtacgtatcgatatcagccagttcttccgcccagctgagccattcgctgagatggttttgatttcgcttcataacagaatacaattcgtccgtatcttctttggcaagcaatctgatcgtcagatgttcccggatttgacaggaaaacacgatcacaccttctttcctttattagccattatacaggtaaattcatttttttccatacaaaaaaagatgaggcgtgcagcctcatccttaaatgcgcgggtcggtgaaaacatcgtgatcatccgtgcttgtcgatgacatttccgtgacgaccgccccttcttctcccgcttgaaaccaatgcttcgtatccggcggaatggtgtattgtccgcccggctcaagcacaatctcatgccagacggtgtagtattccttgtcttcttccggcgggaggacgcttgggttctctgtcttttcgccttccacgtagagatacaccttcccccagcggcagcggaatgtctcttgttttcccttctcgccgccgaccggcggatggcggtgttccggacacgtctgccgcgggaagagcaccaattctttcgaacagtagcggtcggtattcacgtaaataaacagctgaagcccggtttcctcaagcttgcctaagccgtaatccatgatttgaatgtcttcgacttcattatcagtcagaacgattcccgctttttgatagtatgcattcacatcatgtttcgatatcgtcatgcttcagcccccttatgtggttacaaatttgccgccgttgacatgcagcgtctgtccagtcatataagatgattcgtctgaggccaagagaacatagcagccgacatgttcaacaggctggcctgcccggcccatcggcgtagtctgaccgaaggaagcgactgtttcttctgagaatgtcgccggaataagcggtgtccagatcggccccggcgccacggcgttgacacggataccgtcgttgacgagcgcttgcgccatggatctcgtaaaaccgttaatcgcgcctttcgtagccgtgtagtcaatcagctgcggattgcctgtgtaaggattaatggatgtcgtattgatgatcgcgctgcccggcttcatgtaatcaatcgcttttttagtcaaataaaattgtgagtaaaagtttgttttaaaagttctgtgaagctgctcgcttgtgatgtctttaatgctttctttcggatgctgttccgcggcgttattcacgagaatatcaagacgcccgaattcttcaaccgttttttcaaccgcttcattgcaaaagtcttcctcaccgacatcgccggggattaacagacattttacgccttcttcttccactcgtttttttgtatcttccgcatcaccgtgttcatcaaaatagacgatcgcgacatttgcgccttccttcgcgtaagcaaccgctacggcgcgtccgataccgctgtcgccccctgtgataagtgcggttttcccttttaatttatcagcgcctttatattctttgtattcataaacaggcgtcggattcatttcgttctcaatgcccggctggcggttttgtgattccgctgggaattccttcggatagttttccatgtcaagttcctccttcttgttcgatctcatatttcttgtctacctcggcagttctccggataaacatgattgagacagttcaaaacgttttcggagaaaaatgtttcacatggaacgcaagaaaaaaacccggctggcagccgggtttttgttttcaattatgaacgtaccgcttgtttgcggagcacgtcttttctcacttttccaaggttgtttttcggaagttcgctgacgaactcaatttccggaattttaaaggcggcaagacgttcttgaaggaatcgggtcacttcttcttctgtcaggtcttctctgccgtttgtcacgatgaacgctttcggcttttcaccgtaaagcggatcagggataccgacaaccgccgtttcgagaatgcccggcacttgctgaatgacctcttcaatctggtcgggataaatattgtcgccgccgtagatgatgacatctttataacgtccggtgataaagataaatccgtcttcatccacatatccggaatcgccggtatggaaccagccgtctttcagcacttttcgtgtcgcttcttcgttaccttcgtagcctttgaataaaaacggacttgtcacaacgacttctccgattgagccttgcggaaggacttcacctgtttccggatctacaacgcggacatccacttcttccatcggtttacccgcggaagcggctttatccattcccatttgcggattccaagagctgatgccccacgcttccgtgcttccgtatccgtgcatgagcggaataccgatgtcgagatactgctggatcaggctgcttggcacctttgtgcctcccgtcatcatataaacgatagaagacatgtcagtctggtgcgtttcccatgctttcagcaggtatgtgaaatagactggcagcgccatgatggtttgaattttttctttttcgatgagcttcaggttttccacagggtcctgattgtctgtcataatgaatgtcgttccgctcatcgtgccgaccatctggcagataatcgcgctcgtatggtaattcggatggcatgctaagaagcggacatgctgcattctccccgtgtatgccaatgtcgcgttgacgtagttgtatatgccgccgtgagtgatcatgcagcgtttcggattgccggttgtacctgaggtaaacatcagcaatgccgtatcgttttcagacaccgtttcgacatccggtgtctcaccggagcctgtcaataaagcgtcaaactgaggcgttgtctccgcagctgttccggtctcgaccttcagtttaagagaagataccagcgcaggaagcacttcttccataatctctttaaattcagtgctgtaaaaaacagctttcggttcacaggctgctaaaatgcctttcatttcgtaaggtgttaattgccagctgaccggcacaactaccgcgccgatttcgagtgccgcaaacatgacaatggatgccgcgtggccgtttttgcaaagcatcgccactctgtcgcctttttttattcctttatcaagaagcgcttgtgcaagctggttgattcgttttcgatattcagcgtaggtcagggtatgcgcaccgctttttacagcttcaatctcttcgctatttgaaatgtcatgcagaatcagatgctgtaatgtctccatattttcatctcccataatgataaatcacaaaaaaactctgtcagattttctttctcacgcaacccattttaaaccaaaaaatataacttgtaaaactattttgttttagaactattccatcagtgaatgatacaatagtcccgtgtttttagtttcttcccttccccttaccctcatacatgcacaaaaaaacacaccccacatgaggtgtgcgcttcctgtttaccgctgtcctttctcctgaatgaaatgataaaacagcttgtttaaacgtttgtataaatcggcctcatcctcagtctggaaggcttttatactgtcttcggactcgatgatggccgagctgaccgcacttagtatttccgacccttcagcgggcatatcagccggcgccatcatcaccaaagcgcggtcgacggtcagggaatttccgtccatgcctttgacactgcatggagctgtcaaatcataaattttgaaaaaaggcgtgacaatttcttcatttttgagatggtacagggccatcgccgttcccggaatgccgagtccgccctgtcgttcacgctcagcaaggcgctgtgcggttttttgggcattatgaaccaatccttcttgctccagcatgtcaaacatacggttcaaaaacagttcatacgccgtgtttgaatcaatggatttgaccgaaaagttccgcagcacgctttggataaccgccgcgtaatgcgccatacggccggccgcttccagcatatcaggcgtctccggctgcttctcttctcttttaccgtttctttttttgtcaagaatcagcggaatttttcttttgatgtactgcttgacctgatcagcgtcttcttcgtttaaaagcggactgaccatgacgtaatcaatgttttcatacgggatcggaacggtggatacgatcatgtcatacgcggtgatgtctcgatccttcagttcgatgagggaagacatatcaaaggaacggatttccggaagctcttttttcagcctggatgcgagcattttggacgacccgatgccgcttgaacagacgatcagcgctttgatcttcgcttcttcccgtttgatttccaaagcggagccgaagtgaagaacgatgaaagcgatctcattatcagagaaaagaagccccggaaagaatttttccattccttcttctacggccatgtacagcagaaagtagtcgcgtttaatttgctcggtcatcgggttgtacatgtcgatattttcttttacccggttgatcgcaggctctagatgggcgattaaaccgtcgtataaagaaccgttttccgtcagatcaattttaattttttcagaaatgaagccgatcagctgcttcgtttgcaaggccgtttcaacctctatgtcttccggtttgaattccgttttgtatttgcggttggcgctccgcaaatgaatggtgatatatccgatctcagcttccggaattgaaacgccgaacgctttttcaagctcttttgccatttccagcgcagagccgtactccttcgtctgctgcagcgcttttagttccgaagcctccatcgtgatggtttctccgagcctgatccggtccatcgcaaaggttaaatgaaccgcaagcgccatgtatgagctgtcagataaggcgatcgcgattttttccttgagctgaattaagagccggtccattttcaaaagttccgctttatttacgacgccgaacattttttcagcatcgttcggttttcctttaatattcaattcaaccgcttccaaaaagctttgaatatcaaggcggttgacgatgagattgccgacgattttccgtttcgcattttccggccccgtcagctgaatgccgaagcccctttttcggatcagcgtcaagccgaagggcgcaatccaagtctccagctcatccaggtcatagctgatcgtcgcgtttgttacttgcagttcgttcgccagactgtagagcttgatcggctcttgagactctaatagtgaacatagaattaaaagtttccgctcctcagcgctgtattcatgctgttcataggacaggtctgacaggagtttttgtttgtcctccgggtttcctaccgctttcagtcctttgccaggctgtttatcaagtgccagaccgaatgattccatcatcggtttgattgttttcaactcgcggtgaacggttcttgtgctgacttgtaaagcttccgccagttcatgcactgtctcgtaccggttctgcagtaatagatgtttcattaatttttgttctctcgctgtcatatacatgaaacgcgcctccagattttctagttgtgagaagtatggcatatggggagtgctgccggggaaagtggtgtaagctataatataaaacgctttcaatgattattcaaccattttcaaatggcaatttggcactgggccgtgtgacagtattgaaaaagaaaaatgtgtcagataatatgccatgacgcttgttactcttgatccgcacggctatacttcaaagtgaccttacttgtttttagacattgcacaccacataaacaaacgcccggaagatagcttccgggcgtttgttctgtttatggaatatcgcagccttggacaccggtataaatccggaaccactgatcatggctgagtttgtacgcggatgcacgcaccgcggcggaaatgcggttctcttttccgctgccgacaatcggcatgatgtctgccgggtgggtgaacagccatgcgtacatgacttcgtcaatggaagcggcgccgatttcttcctgtacggaacgaagcgcggcacggatacggacgtccttatctgattgtccggtaaagacgctcccgcccgcaagcggtgaccacgccatcggcggaatgcgtttttcctgacagaaatccagcgtgccgtcatgaatattttccagctcgtacgccgagatttcaatttggtttgtgatgagcggatcatccaaataggattcgagcattctgtactggtgcgctttaaagttcgacaccccgaaatatctgacctttcccgagcttttcagcgcatgaaacgcttcagccaccgcctccgggtccataagcgggtccggtctgtgaatgagcagcacatccagataatccgtattcagattcaagagcgactcctccgccgacgctaaaatgtgagacttcgacgtattataatgatgcgacttgtttccgggccgttccggtgattcaatgacaatcccgcattttgtgacgatttcgattcgctcccttattgaaggcgaaagggacaaagcgccgccgaagagcttttcacacgtataaccgccgtatatatcggcatggtcgaaggtggtgatgccttggctgatacaccattcaatcaaattcagcagctctccgtctgaaacattccattcgttcagacgccaaagcccgtgtatcactcttgaaaattccaggtcttcagccaattgaatgcgctgcatgtgagatccccctttttcttagagcctcttgtatctctgttttcaggaattgcccatgctgtttcattctgcttcggcggccgattttcctttcagcccgcaaaaatcgtcatttaatgattctgaaactgctttttcgctttttcaacgacgtaatggcttccgccgcgttttttgacgtcttgaatcatcatcgcgatcaagaggtctttctttttataatcgtaaccgacaaaccagccgttttctttgccgtctttatcttctttagacgttttcagctcggctgtaccggttttcccggctacggtaatgccgcttacggccggctgatatgcagagccgcgcggatcttcaacgacgcctctcagcccttttgtgatttcttcggcattggctttcgataccacttgcttatgccagatttgcggtgttttttctccgtctttgatcaatgtcggtttgacgagatttccgtctgttacaaatgcggtatagtcagccgctaagtgcagcggagacatcagcatctgcccctggccgtagcccgtatctccgagaaggatctcggaatcaagcttgccgttagcgattgaagacttttcaatcggaaattggtacggaatctcttcatcaaagccaaatgtttttaatccttttgtaaacgcgtccgctccggcatctatggcattttgcgcaaagtagatgttgtctgatgtgatcagcgcgttttcgagatccacttcattcaggcgctctgatacgcgtgtgacatggtaaccgccccagctcgaatctttctgccactcttttccggtgatttttttcttttctgacgctttcaatgtgccgtttgtcaggccgactgccgcggcaatcggtttaatcgttgatcccggcgcataaagtttgttgaatttcgctgaaaacggattgtttttatcttcattcagctttttccactcttttccgctccagccgaaaagaaagccattcgggtcataagacggtgcgctgacgagcgcgagtgtctctcccgtttgcggttcgagggcgactgccgctccgctgtcatctttcatagaatcatacagcttcgtctgcgttttcatgtcaatcgttacatgaatatcctgcccgctttcggctttcttttcagcaatgacctcacctgtttgcgggacgtaaattttccagccggtcgtgccgcgcagcttgtcttcatatacattctcaaggccggcgatgccgattttggaagtatcgctgtattggccgtctttcgcttttttcagctgctccgctgtgatggttttaatataaccggtcagatgggccgctttttcgccgtacggatagtagcgggagctgactttcgttttcgtcacgccgtctaatgcgagcaggcttttgaccttgctttcatcatccggtctgattttttgaagcgggacataggagtcgtcttttacccagccctggttcagtttgcttttgatatcgtcttcagaaaggtccagtttttcagacagttttttgatcacgctgtctttatccttgccgagttttccagggataatgccgatttccggcacctcggtattcacggcgagaccttttccgtctttgtcgtaaatttgtccgcgcttcggttcttcatttgcgatctgcacggttttgtcatcggaaagctgtttgaaaataaaagaaggattccagtcgatgttccatgattctccatcgtctgttttttcttttttcaggacggccgtgttttcaaaagcgaccttccctgcttttgtatccatgctgactttataatcgatgtgctggaggtcatcttttttcttgtcgtcttcgtcctgtttttcggcagtgactttcagatttttgacccctgcttgttcataaacggtttcatatcgctttacaaaatcctttttggatcgttttttcttttcatcctgggtgaggctttggtacatcttatcgtaatgaccgccgttccagtcttttacgaaatctttcattctgtcttcggccgattccgttttcgagcagccgatcaaacctatgattcctgcgagtaaaagtaataggtataacccttttttcactgtctattcccctgccttccaactgttattttctcctaaaccaaatcaggctggcaaggatttttttctcatattgtttaaaatttttttgtttttcctgccgtcacgggccatattcttatacaatgtatctattaaaaaaagggggaatttcagatgatcagagaagcagccatgctgtatgtaaaagaaggtcttgagggggaattcgaagaggcattccgccgggcggagccgattatcgcgggcatgaaaggttatctgtcccattccttgtccaaatgtatggaaaagacgcataaatatttgctgcttgtggaatgggagacattggaagatcatacaaaaggctttcgcggatcgccggaatatcaggaatggaaagccttactgcaccgtttttattcaccatttcccgttgtggagcattttcaggatctatcagcctcagatcgcgtgaagcgtaaaaccgattaaggagatcgaccatacaaaaacggcggtatagatattgaatttcccggagccgtcgttttctttccgtttttcctccagcccctgaatgaacatgaccgcaccgagaaacacgagcataaccggctgtatgacagaggtatgttccgcatacgtaaatgcggcggccgcaagtataataatcagcatcgcgagtgacagttttaaggcgcgcagcaaagcaatccatcctttctgttatcattttttgaacacaattctatttctgtctttatcccccattattctagcgtattttttgcgcggatagaacgaaagtcggacaattttaagtttgttttaaggagcacgaaaagcgcgctcccgataaaaaggagcgcgcggttatgagcgggcgagggttccgtatccgagcccccgcaggacgcatgccatgacttcataccccttgctgttggggtgtacgcggtcatgagagagatattcattcatttttcctttgaaagcgctgtggacgtccgcaattttgacgtgcggcgccgatgcgagtgtgctgaggtgcgcattataagaggatatccatttttctgcaatggagatgcccgggaaaggattgtataaattgaagacgcggatctcataaggagacgggtgcggcccttttaaggcagcgatcttggcaatcatcttttcaaagttctcatggcagtgactggacacgctggtgaacaccgaagcgtccgatgtttgctgatatgcctgaaccgaatcgatcaaatcgttgccgcagcctgtaatcgtaatcatatcagcagcctgaatccgcctctgaatgtacggcaaggacataagcccgagaatttctcccgtctcaaggcctgatttggcaaagatggatacgtcagttcttgtctgtaaatcttctgccatcatacgcccaaaccgctggacaaaaccggcggaaaacggcccggatcccctccccgtcgtcaaagaatcccccagcgccgtataaacaagtcccatttactttcctccactcgttactatcgatattgtaatgtacgcgagtgaagaaaaattggctcggtcaataacccaatttctcagaaatatgctgtgcggcggttttgaccttttcggttaaatacggcagcctatcctctgaaaaccgggcttcgaagccggcgatgctgattccggcagccaccttaccttcgtgattgaaaatcggcgccccgatcgccgccgtgtaatcttctaattccgaatagctgatcgtataacctgattgtaaggacctttcaatggattgaagcagttcagcccgatccgtcatcgtgcctgaggcgattgcggcaagctttgtcttctgaatgtatgtgtcaatctcctcttttggcagaaacgatagaatgcttctggcgcacgctcccgcgtacagcggcgaccggcggccgattgccgtatacaggcggacggtttgagtgccttcaattttttcgacgtaaatggcttcatctccgtccctcatgatcagctgaacggcctcatccacttcgccgcacagctcttccataatcggtttggctattttcctgatgtccagacgttcagagacgagctggccgaattgtaaaaagatcagaccaagctgataacggccgtccgctgcccgggtgagaaatcccgtttcctccagcgagcttgccatccggtgaaccgaggtcttcggcatttccgatagagaaaccagctcatttaagctcaggctcggttcagtcagaaataaatgaagcagttccattgatttgatgacggttttgtttttgttttccatggtctttagcccctttgtcagatcagccattccattttgagccttgctttcagctccttcagctgctgttccttctctaaaagcagcatttccgcttcctccagcgaaacggcccggaacgtgatatgttcccccggcatcgtttgggcgacgagaggaagatcagcggatatgatatgcgccatccgcggatagccccccgtcgtctgtctgtcagccagcagaataatcggattgccgtccggcggcacctgcaccgttccgaacgtcacggcctcagataccatctccagcggctcccgcaattcaagcggagcgcccttcagccggtagcccattcggtcggattgaggcgtgaccgtatatgactcttgataaaaacgcaattttgcttcttctgtaaaagcgtgaaattgagcgccttcaagcactcgtatgaccggattttttttcagcggcagaaatcctctgctgctgacagaccaatcaggcgctgagaaaccatgctgtccgaaagaatcgctcagacggtacgcgattgattccgaacatggcgtcatacggccgagcggcagctcatcatctttttgcagcgctcttccgcaaaaaccgccgatccccgctctgacatatgtgcttttgctttccatgacggcgggcacgtcaaatccccccgcgacggcgagataagcgcggctccccatcttgcacggcccgaatgagacgacgctgttttcctttatcaaaaccggtttccacagaggggcgggctccccattaatatgaagggcgaaatcagctcccgtgacggcaataaccgcaggttctgaaaattcaaaggaaggcccgggccccatgagcgtaatttccagtcccgcctctttttcttgatttccggcaagaagattggcgatgcgcagtgagatcgtatccattgcgccgcttcccagcacaccgtatttctgatatcccgtccgccccttgtcctgaaccgtcgtcaagagaccgggctttaccactttcatactcattcggctccctccttgatgcggctgtactcctctgccgtgatccggacgaatttcaccgtatcgcccgctctcaaaagactcggcggatgttcttccggcctgaaaagacggagcggggtgctgccgatcagctgccagccgccgggagtggatatcggatacacaccggtctgcattcccgcgattcctactgaaccggccgggatggacggccttggcgacgcctttctcggcgctctgatccgctcagacattcctcctaaaaacggaaatcccggcgcaaatccgagcatataaacgagatattcgccttcagtatgaatgcggatgacgtcttccagggtcagatcgttcatctcagcgacctcttctaaatcgggaccgaaatcaccgccgtagcaaacggggatttccatcacccggcgctcttctttgcggccggtcattatatggctgagacgttctgtcacttctttcttgaccagggcaaaaggagagacgcctttttttatgtttgagacggcatacacatcataaaagatcgttaagcttgtgaatgccggaatacattcaacgaagcccggaaacggccgttcttccatacaggctgccgccgcatgcacccggctgttgacctcttcgctgatgtgcccgccaaagcggatgataacggcggaatcaccgtacggctgtatatcaagcgctgtatttccgctatactgcatcattgtcatcacctcgttgtattctttctcacttacaggacagcaagcgattcatttcgtatatcggtgatcagcatgtgccccggtgaatgtgttattacgatgtcaggctttgcttccatgatcaccgcctggggcgtaacgccgcaagcccagaatacgggaacttcaccttcccgcaccgttacggcatctccgaaatccggctgatgcaaatcgctgataccgatgctttgcggatttccgatgcggacgggggcgccgtgcacggcgggaaaacgtgacgtgacctgcgccgcgcggactgcaagcctttccggaatcggtctcatgctgacgaccatctttccagaaaacgggccggcgggaacacagtcaatgtctgttttatacatggggacattcacaccctcatcgatgtgcctgattggaatgtgctgattaataagggcttgctcgaatgaaaaactgcagccgattaaaaacccgacataatcatccttccaatacggcgtaatatccgttacctcttcagtaagcacgccatgccgataaatcctgtatttcggaaagtccgtccggatatcagctcccggcgcagctattgccggaacgggtgaacccgcatccgtcacatcaagcaccggacaaggcttttgattgcgctggcagaataagagaaaatcaaaggcaagatccttttgcaaaacgacgagattggcttgagcgtaagaagcggccatccccgccgtcggcccggtcatctgccccttcctgatcagctgtctgacttcttcggggctcatgtcactcatatggtttttcatatcatcagctccatagctgcggcatctgcgtgaataatgtatagatgcccataaccgccatgacaaccactacgatcgcccctgcaatcgtgagccagatcggatgcttgtaatcgccgacgatttttttcttataagcgcccaacagtatcatcgctaatgcaagcggcagaattaagccgttaagcgaaccgaccgcgaccagaattttggcaggctggccgatcgtaacaaaaataagagtggatacgatgataaaaccgataatgacgccatgtgagtgcttttcgatttttgttgaaaatgatttgaaaaatgataccgatgtataggcggcgccgatgacagacgtgatagcggcagaccacatgatgacgccgaaaattttatagcctacatttcccgccgcaagccggaatacagaagccgccggattatcaggatcaatgctcaggccctttgagacgacgccgagcacggcgagaaacagggcaatccgcataatcgatgtaatcagaacgcctgtgatggagcttttcgtaacctgagggaggacttccttcccttggatgcctgaatcaagcaaacggtggccgccggcaaatgtaatgtatccgccgaccgtgccgccgacaagcgtcacgatcgccagcacactgatatgatcaggcataaaagttttcacaacggcgtgtccgaccggcggagccgtcgttacggcaacatacacagtcaatacgatcatgacgatgccggcgatctgcataaaacggtccatgacttttccggcttcctttatgacaaaaatcagcaccgcgaccgctgcgctgattaaagcgccgatctccggtttgatcccgaataatacttgaagaccgagacccgcgccgccgatgtttccgatattaaacgcaagtccgccgagcacgaccagaaaagcaatggcataaccggcgcccggaagcaccatattggcaatctcttggccgcgctttccggaaaccgcgataatccgccatacattggtttgcgcgaaaatgtccaaaataatagaaattaaaatgataaagccgaagcttgccgccaatgtattggtaaacgtggccgtttgcgtcagaaagccgggcccgattgatgatgtcgccatcaaaaatgtcgcgcctaaaagaagcgaccatttgccggaagcctttccggctgtttttttcttttgctccatgctgtcttcctccctctgctgctcagtcttttgaaagtgcgctgatttgaatgtttgccgcttttaattcttttttgattgtttttgcgaatgtgagggcgtgggctccgtctccgtgaatgcagaccgtgtccgctttcaggcttacagcttgtcccttacgtgatgtcaccgtgctgtctttcaccatttgaatcacttgaccgaccgcttttttgtcatcctgaatcagcgcatccggctctgaacgcggcgtcagcgtgccgtcttcctgataggtgcggtccgcaaacacttcgcttgccgtcctcagtccgattcgatctcccgctttaatcagctcgcttccggaaagcccgaaaagaataagcccgggatcaaaatgacagaccgcctgagcgatggcttctgacaggccgggattgacggcggccatattatataaagcgccgtgcggcttcacatgctgcatctcgacaccttctgcttttaaaaaccctgacagcgcgccgatttggtacagcgtcagatcatacgcttcctcgggtgtaatcgcgatctgccgccgcccgaatccctgcagatcgaacagcccgggatgagcgccgattttcacgcctttttccgccgcaagcgcaaccgttttgcgcatcacgctgggatcacccgcatgaaagccgcaggcgatgtttgcagatgtcacataatccaaaatctcttcatccagcccgattttataagcaccgaaactctctcctaaatcacaattgatgtcaatctgaaacataagatccctcctgtattgtaaacgttttatatgattatcattccgctattcggaatgactattccgaattgttggatttctcttcattatatttatttctgacaggtttgaacatccttttgtcagaaaacctaccatggacctagtcacaaatctgacaaaacaaaaaaagagagcctcatactgagactctctcttttttctattataacacccagtggcggatcgctttggcgaccccgttttccgtgttgacatcagtcacccagtcagctgtttctttcacaatgtcctgcgcattccccatggcgacgccgacacccgctttttcaatcatggcaatgtcattcagactgtcacccatggccatcacattttccatcgtgaagccgagtttttccgataccttcgccagcgcagccgctttgttgataccgagggcattgacttcgatgttgatcggactggagtttgtgatctcgagctccttgtattccttgagctctttcagcacctcattccgcacttcgtcatcctcgatttcgaatccgaacttgagccactgatgatccgtaatcgtttccgggaattcccctctccacactctatcgacggtagaggcccagaaattcgtgttgtgcttattcctcagatcccataatttttgaatatgatcggtatgaagaagcttgcgctcaaccagctcaaagtcggaatcccagatttcgctgccgtttgccgtgattaaaaaggatgacagctcgagagactcagccagttcgcggcaggtcatcagcgtgcgtcctgtgctgatgacgacgtgaattcctttcgcctccgcctccttgatcgcccgccggttttcttccgggatgagctgctcgtcattgagcagggttccgtccatatcaatcgcgatcagtttaatatctgcgtcttctctttgtatcggcatatatgtacctcactttttataatgtagtcgtctctattttaatacatatgacccacaggaacaaaaaaccgctttctgcgtttggcggggggaacgttgaggaaaagaaatattgaggtgatggaggatgaaagaaagaaaacaaaagaacaaaccgaatgaaaatcctgaacatcatgatttaaccgatccgattccgctggaagagctgaaggaaaacgccaatgacgaaaaacacaaacatgaccaaagggacaattcacaaagtgaaagagattatgatacaaaataacagacttgtacgaaagccgccgctggaggcggctttttttacgatggctggataaatatgctgagctcagcttccgccacaggcttcccggcaacggacgctttcgcccggccgaacacaaaaccgcgtctgattcgcgtgacctcaaaaaaaagatccagacggtctcccggcaaagcggcacctaacctttccgctttcttcaccgcggataagagaccgaggccgtcaccgccggtaattcccgcgcaagccgccgtttgggccattgcttcaacgacgagcgaaaatggcatctctctttgggattcagttataaaccagtcattttcactgatgtttttgtaagcagccgcccattttccggcttcactgttcgtcgtgccgtccatcaaaagaaacggaaaacgatggggcaatagcttctgattcatcacgcagcctcccttctctctcattataacgcaagaaaaaacccgcgtcccccgacgcgggttcatttttattgattgagctttttgagcacgatgccgtgcagcggttcatgcggctgaataccgcaaatgtcttgaagaacgccgctcgtgcctttttccgcgataagcttttgcagctcaaccgcttccggatcatcctgatagtcaaaacgcaaggcggcggcgatgccttctgccagcgcgttcggttcttttatttttttggccggccctactaatctgtcattcgctccgagttttctgagcggtgatctggcgactcttgtcacatcatccgtgatgtattcattttcaaagcggccgatgatttttttcatgtactgctcgtgttcggcttgcttaaagccgtacgctttcactaagtactcgcccgtttctgaaagtgcatcgtacacgacacgccggatttccggatggccgatggcctctttgacagtttttaatccgcgctgatagccaacgtacgccgtaacggcatgaccggtattgacggtaaacagctttctctcgatgaaaggcgtaagatcatccgtaaacaacgcaccttccagtaccggctggccgccggcaaagccggttctgtctatgacccattcaaaaaacggttctacggatactttcagcggatcttcatggtgctgaatcggcacgatccgatccaccgcagaatccgggaagccgaccgtccggttcacgaattcccgctccgcttccgtcaaatgtccgaaaacttcttttttcagaaaactgctgccgccgatcatattttcacaggcaatgatattgagaggctcagaggacgttctgcgcttcagcccttccgcgatggacggggcgatgagtctgagaacgttcgggcccaccgccgtcgtaatgatcgccgcttcattgatcagcctgtacagctcttgttcttgcaccgcgctgttgatggctgaaacggggccgatgatttctgtctgccggccgccgtcggcaagctccacggtatattccttcttttcattgagaaggctgaccatcgtttcattcacatcagcgaaaactacctcatagccggaatgatggagcagggcgccgataaagccccgcccgatgtttcccgctccgaaatgaagggcaatcatgtcagttcacctcgctgaaaatagcggccagttcttcttccgtctttgcactgatcagccgttcgatgttttcttcctctgagcagatgatggcgatgtttgacaggatgtctaagtgttcattgttttttccggcgataccgaaaacgacctttgccgtattgccttcaccgtattccacaccgtccggaatctggatgacggaaatgcctgaatgaagcacctcatccttcgcatcttccgtgccgtgcgggatcgcgatgaaattccccataaacgtggatgatgtttcttcacgttcgaacattttttccacatagccgttcttcacgtagccgttatcaatcaatgtctgtcccgcgaggcggatggcatcctcttttgagttcaccgtctggttcagtttgatgttcgctttagccaatacttccatgatgaagatccctctttctgttgattagtttttaagcttttcaatcagttcatcgtatttcgggctgttcaagaaattatcaaccgaaatgtgcaccgcctgcggcagcttcgctttcgcgcggtcagtcaggtccttatgcgtaatgacgatatccgcgtcattcggaagattattgatcgacgtatttgtcacatcaatatccaggtctgcttttttcactttgtttcttaaaatggaggcgcccattgcgctcgatcccatacccgcgtcacacgcgaagataatgcggctgacttggtcggcggaaatatcagcggcgctgttttccggctcttcctctttgtccgccaacgcggccgcagcttcgcttttcctgcctttcatttcctgcattttttccgccgcggctgtcaaatcttcttcgcccgctttagacgatttcagaataagcgccgagacgataaacgatacggccgcggcaacgatgacgcccgccagcacgccgagatagcttcctttcggcgtcagcgccaaaatggcgatgatgcttcccggagatgatgcggcgacaagacccgcgttaaagatcgagaatgtaagcagtccgctcgctcccccggcgatcgccgcgaggatcagcatcggtttcattaaaatgtaagggaaatagatttcatgaatccccccgaagaaatgaatgatcgccgctcccggagccgtcgatcttgaagagcctttcccaaagaacatatatgccagtaaaataccgagtcccggcccggggttcgcttccactaagaacagaatggatttacccgctttggcggcctgctcgattccgatcggacttaaaatgccgtggttgatcgcgttattcaggaacagaactttcgccggttctacgaaaacgcttgcaatcggcagcaaattcgcgtggacaatgacttccacacctgccgccagcaatttgttaagagacaggacgaccgggccgatcgcataaaatgcgataatcgtcagcacagctccgataattcccgccgtgaagttgttgatcagcatttcaaaaccctgtctgactttatctttaaacacacggtctaattgtttaatgagataaccgcccaaaggccccataatcattgcccctaagaacatcggaatgtccgctccgacaatgactccgatggcggccgtcgctccgacgactcccccgcggtgatcgtaaatcatttttccgcccgtatatgcgattaaaagcggcagtagatacgtaatcatcgggcttaccaatgtattcagctgcggattcggaaaccatcccgcaggaataaacagcgcggtgataattccccatgcgataaatgcgccgatattcggcatgatcataccgcttaaataactgccgaaccgctgtatcttcactttcatgccagcttgctgttcttgctgcatgttcattccctccctgtttgcttgccttcagatgaaaataaataagacacggggtttctctctcccctgtgtcttcatcataaaacgcttacaatccccattcaatgaaaagtaaagaggagtttggcacagagactgtgacaactccttaacaaaaaaaagacacctcatcaaaggtgtcttaccgctttctgtatataatgtgtccttttgtgacgacgagtttggcaatgagccgctcactgacaataaacaccggatacgcacatacgagcgcgaaaatggcggccggcacataccgcgctgccggaaacatcggcatgacggcggttctggccatctgcacaagataaatcaaaagcaccgtgatcgcaatggccgcagccataatcggagctgatactttatattcacgcaatttcacatggcaatgcccgcactgaaactggcacgggatcatggatgatctgaccatgtcgcctgtaatcggcttgccgcagttcgggcaggtcgtttctttcatgtttattcctccattcaactcttctattataacagagtctgactacgtcttttacatttgtgattgttcaacattttttcacatattttatcatcaggctcttgtgtgcatttgtgaaaacatctactcttagagggaggttcatcactcattcgcataaaaaggaggatgcagaattgcttccgattcacagacagcaaaccttgcttgaatggctgaaagaagagggcgcgctgaaaatctctgacataagcgagagattcggcgtctccgagatgaccgtgtacagagacgtcaatcagctggcggatgcaaaccggattatccggacacccggcggcattacgctccctcccgcttcagaacgaagcgccaatcaatgcggctattgcctgcggccgattcagcattcgtattctgttcagcttattaccgtttcacaagccgttgagcagatgtgctgcattcattgcgcgattttgcggtatgaggataaaaaggaagaagtgtcccacgtcatttgtaaagattttcttctccagacgacgctgacggccgcttccgcatactttttagtccatgccgatattgaccttcactgctgccggcctcaggcgattcccttctcaacgcttgattacgcagaacggtttcaaaaaggattcggcggggtcatttgcacctttgacgaggcggcggacatcatcttacacgacaggcagaagggatgcacctgcagcaagacataacaacaaccaaccggaaggcggtgtcatcatccatgagacagaacaaacgctggctcatctttttgctgttccttgttttgattccgaaaacaagcttcgcccacgcctacatcacaaactcaaatccgggtgagaacagcgaattaaaacaagcgccgaagcagattgaaattgagtttaatgaacagattgaagaaggcttccactccattaaggtctataattcatccggcgaacgggtcgatgcgggaaaaacggtgattcaaaaaaatgatgcccgcatcatgaccgcggcattgaaaaaaaatctgccgcatgatatttacagagcggaatggaacgcggtatcggccgacggacatccggtatccggcgtcatccctttcagtatcggaaaagccggcggagaacttcgggagcagacatcatcgcaagcggcgcttcatcccgaagcggccatcgaccgcggtattttgtacaccgctctctccctgtttatcggcacggcttttttccatctgttttggtacagaaataataaagattcatcaaaagcaaaacgaactgtaaagctgctcgtgatttctttatgtgtaacggggctcgcgcttatctgccagctcccgatccagacgaaagaaaacgcgggcggcgcttggagcgccgcgttccagccggactatgtaaaagaaacgcttctgaaaacggcaggcgggtacgtctggatgatccagattagcttatttatcctgctcgccctgtccatgatcccgctgttgaagaagaaagcattccggtcatttgcgtactggacggcgccgctgttgttcttcttcgcttcgcttttggcaaaagcattcgccgggcacgcggcggtcattgacgaaaaagcggtcggcatcgcgatggactttctccatttatcggccgcgtctgtatggatgggcggtatcgccgcgcttgtgctgcttctttcatcagagtggagaaaacccgataaaaccatcgcttgggaaacggtcagacggttttctccttgggcgttcgcctctgtcggtgtgctgttattttcaggtgtgctgaacggatttttcattatccgcacgtttgattcactctttcacaccgcttacggtaagacgctccttttgaaaatcggactgttcgtcatcatgcttgtgctcggcgccgttcacgtatggatgacgaagttcagcagaaaaaggagcatcagcgcaacgataaaggccgaatgggcactaggcatcgcggtattatttacaaccgccgtcttcacaagcctgcccagcccgccgccgcctgcgccattgccttttaacggctcagaaacgatcggaaacggggaaaccctgtccttgcacattacgccgaaccagccgggtaaaaatgaatttcaagtcattgtcaccgatcacaacggcagcttggtaaaagacattcagcaatttacggtcactgtttaccagacgggcttcagcggcaaacagcatgaaagcacctttgatttgaagaagacgaaggaaggcacattcgaagccgctaacctgtccatcaccgaaaagggaaactggaagatcaaagtccacgggctgacaaacgattttaatgaaatcaaccaaatattctcaacgacaaactaaggagtgtatctcatgttgaaaaaaaaggctttattattcatatccgccgtgaccctgtcactcgtcggttttacggcgacagcaagcgcccacgtctcagtcaaacccgcggaatccgcggccggttcctgggaaacctacacgatgaaagtgcctgtggaaaagaatgagccgacaacgaaagtcgtgctgaaaatgcccgccggcgttgaatttcagcagtatcagccgattccgggctggaaaacattcgtatccaaacatgatgacaaagcggtctccgtcacttgggaagcaaaagacggcggcattcagcccggccaattccagcagttcacgttcgttgcgaaaaatcctgaaaagagcggagatgccgcttgggacgcttaccaatattacaaagacggcagcattgtagaatggacgggtgatgagaaagccgacacgcctcactcgattacgaaaatcacgaaatcggccagcgtgacggatgcgcacggagctgaacagtcaaacgtagaaagcaaatccggcgtatcagcgcttgatattgcagccatcgttctgtcagctgcggcgattatcctttccatcgcggcgcttgtaaagaaaaaacgcgcgtaagcaaaaagcgatccggctctaaagagcctgcgatcgctttttttcttatccgcggcctgcctggaatgacggatatttggtcattcccccgtcagcaaacagcgtaatgccggttacgtagcttgattcctttgaagcaagccagacggcgacagccgcgatttcttccggctcaccgatatatcccatcggaatcatgctttccacatcttttttctgaacgggatccgcaaatttttccgcgttgatcggcgtattgatggctcccggcccgatattgttaacacggatgcgcttcggcgcgtactcaagcgccagcgtttccgtcatcaatttgatgccgcctttactcgccgcgtagtgaacaaacagaggccatggaatcatttcatgtacgcttgacatgttaatgacgtttccttgaatatcattctctacgtaatatttaatggcttcgcggcttcctaagaaagcgccggtcagattggtattgatgactttgttccagtctttgagcggcatttcatgcgactgaaccggattttccataccggcgttattgatcatgacatccaatgtgccgaattccttcaccgcggtctgcacgatgtttttgacatcttcttcttttgtgacgtcgccttgaatgatgaccgcttcgcctcccgctttttgaatctcttctttaacggtttgggcgtctttttcattactatagtagttaaccacgactttcgcctgctcctgtccgaagcggatcgccatcgcttttcctaatcctgatgaagctcccgtaatggcaacgacttttccttttaaatccgtgtacatgttcaaacctcctgcatttgttatgaatttgatttcgcaacgcctaagaataccgcggccacaatgatcaggataatcccgatggcaatggcgaccagctgacgcttcgttttgctctcacggagaatgaagattccgccgagcgtgctgatgacgatccccatttgagagagggaaaaacttgtcgcaactccgacgcgcggctgtgagatgaacagaaacatattcccgagcgcccagatgattcccggcagaatgttcttgagggcgtacttattaaacggtttatgcttgtacgtcaggagcagtccgccgatgaccatcccgatcgcctgcggcaggagcgctgaccatccggatacgccgaacagccgggccacaacgacatagaccaaataaccgagcgtggagatcagcaggatgacaatgcctttttttaagtttcccggttctccgtccgcccgcccctttttatcttctaaagatgtgagcacaatcccgatgatgataaaaataagggcgagaatacccagcgtaatcgcgatcggggttgaccattctttgaatacgatcacaccgaacaaagaagtcgagacgagctgcattcccgttgatatcggcatcgtttttgaaacgcccatcagctgtatgcttttaagctgattgctttggccgagtgaccaaaacagccccgagatgatgccgacaataaaaatgcgcccagacagcaccgggtggacaaacagatacaacacaaacgaaacgatgagcgccccgattgtcgttcccagcgtctggctgtaaggcccgccgcctaatttgacgttaaataacacgatgctcccccaaaataaagccgggagaagagccaataatatatccatgatggcgaccttctttcaatcgtatttgctgttattttgtctggaatcgaaccgattattcccgcaagatcaaaaaagcctgccggcgatattcaccggcagactgctcaataaaaacagccccgcttagaagcggggctttcttttcggctcattaaagtccgatagacatgtatttggtttccaggtacggctcaatgccttccgtaccgccttcacggccgatgccgctttctttcattcctccgaacggcgcttgaaccgcggacggaccgccgtcattccagccgatgatgccgtattcaagctgttcagaaatatagatgccgcggcggtagttttctgtgaagaaataagccgcaagcccgaacggcgtatcgttcgcaagcttgatcgcttcatcaatatctgagaacgtaacgatcggcgcaaccgggccgaatgtttcttcatgcatgatgttcatggatgtatctacatttgacagcacggtcggtgtcacgaaatagcagcctttttcatcgttttggtcatacgttccgcccgtcagcacttttgcgcctttttccacggcgtcattaatttggccgacgattttatcgaagccttttttgttgatgacagggccgacgtttacgcctttttcaagaccgtttccgactttgagtttcgcagcttcttcactcagttttttcgcaaactcgtcttttacggattcgtgtacgatcagccggttcgcacagacgcaggtttggccggcatttctgaatttagaggccattgtttgggctaccgccagttcaagatcagcgtcttcatccacgatcagcggcgcatgtccgccaagctccattgacatatgttttacggtgtcggcgctgtttttcatcaggattttgccgacaggcgttgagccggtaaaggtaattttgcggattttcgggctgctggtgaagacgtttccgatttcggctccgtcaccgatcaccacttgcagcacgtccttcggaattcccgcttcatatgcgagacgcgcaagggcgtaagcggaaagcggcgtatcctccgccggtttgatgatgaacgtacagcctgccgccaaagcgggcgcggcttttcttgtaatcatcgcattcgggaaattccacggcgtgatcgcggctaccgggccgaccgcctgacgggtgacgacaatccgtttgcccgttgtcggcgcaggtactgttctgccgtaaatccgttttgcttcttcggcgaaccattcaatatagccggcgccgtataaaacttctccgaccgcttcttcgtacggtttgccgttttctttcgtaattaattccgcaagttcttctttattttcaacaatcagctcataccattttctcagcagtgaggcacgttctcccgctgatgttttggaccatgattgaaacgcttgatgtgaacgttcaatcgctttttcaacatcttcggccgtctgctgggggatgctttcgatcgcctctcccgttgccgggttgtacactgttaattgttctggcatattgaacattcctttctctgctatagtaaagccattgaatgctagttgatgtatctcacactttcatgatagcagacacatccgccggcattccaataattgaactcacagagctgcttcgataatggaaaggccttctttgagctgctcatccgtcacgacaagcggcgtcaggaatctgataatgttgccgttaatgccggccgtcagcagcagcagtccgttctcgttcgccgttttggcgatcgccgcggcttttgctttgtccggttcccgcgtgtccggatctttgacaatttcgatggccgccatcgcgccgagtctgcgcacttctccgatgcaggcatgctcttttttccactcgagcgcttgatgctcgatgatccggccgatctcctcggaacgctgattcagcccttcttcttcaataatatccaagaccgcaagcgcagccgcacagccgagcgggcttcccgcatatgtgcccccgagttcccctggcgcggcggcatcaagcatttccgcccggccgatgacgccgctcagcggcaatccggccgcaagtgatttggaaacggtgatcaaatcaggaacggccccgaaatgttcaatcgcaaaatacgttcccgttctggcaaaaccggtctgaatctcatccgctacaaaaacgatgccgtgttttttacaaaaagcggcgacgtgctgcacgaaacgttttgacggaatgatgaagccgccctctccctgaaccggctccatgacgacacaggcgacggtttccggtgcaactgcggcgataaagaaatcctcaaaagcgctgatgataaagtcgtcatactgctcgtcgctcatgccggccggcttttgataataataaggaaacggcgcctgatacacctctgaggcaaacgggccgaaaccgaatttataaggcttcaccttgctcgtcatgctcatcgtcatgttcgtgcggccgtggaaccctcttgtaaatgacacgacagcctggcgcttcgtatattttctggcgattttcacggcgttttccaccgcttccgcccccgaattgagaaaaatcgcttttttcgcatgatctcccggcgcaagggcgcaaagtttttcggccagctcaatataagacggatacatcatgacgttaaatcccgggtgaatcagatcctccgcctgtttcttcacggcctccaccactttcggatgggaatggccgacattcagcgttccgatcgctccggcaaaatcaatgaatcgtctgccgtccaaatcgtacaaaagcgccccttccccttttaccgccatgctgcggtttccgttgccgacccccttggaaacgaattgatcccgtttttgctgccactgggcagttgtcacttccgatgatgctgttcgactcatagattccatccccctgcattgttttcttatcattctgacttctttttggtatgatgaaaagtaccaaaaccaatttatccatggtatcagaaaggggcagggtctggatgctgacgatttccattgaccattcggaaacggcggattatatctatcagcagatctatcagcacataaaagcggccgttttaaagcgcagcctgatgcctcatacaaaggtgccgtctaaacgggagcttgccgagacgctgaaggtcagcgtaaattcagtgaattcagcttatcagcagctgctttcggaaggttatttatatgcggttgaaagaaaaggctttttcgtggaggaaattgaaacgtttgatcatgaagaaacgccttcgctctcattgcctgaagatttaaaagagcgggagacggataaaagcggctggatttcgttttctcatatgagcgtggatacggcgcattttcccctgaaaagctggttccgctgtgagcagaaagcagccgcccattcatttcatacgctcggtgaactcgtccatccgcaaggcttatatgaagtgagggcaacaatttcgcggcttatttctctgacaaggggcgttacatgccgcccggaacaaatcgtgctcggggcgggcacgcaaatgctagtgcagctgctgacggaactgatgccaaaagacgcgctgtacgccatggagaatccgggatatatgagaatgtaccggctgctgcaaaacctcgggaaaaaggttgcgacgatcagccttgatgaaaaaggcatgtccatggacgaaatcgaaaaacgccggccctctgtattgatcaccacgccttcccatcaattcccctcaggcgtgatcatgcccgcttcccggcggattcagcttttaaactgggccgccgaacagaacggccgcttcatcattgaagatgattatgacagtgaatttaaatatgacgccgatacgataccggcgcttcaaagccttgaccggtttcaaaatgtcatctacatggggaccttttcaaaatcccttttcccaggtctgcgcatcagctatatggttctgccgcccgggcttttgcggacgttcaaagagagaacgtatgacctgcatacgtgcagcacgcttgcccagctggcgctgaaagaatttatcgaatcaggtgaatatcagaaacatattaaaaagatgaagcagcattataagaacatgcgggaatgcctcatttcggctttggaagaaacattcggaggaagaatcagtgtaaagggcgccaatgcggggcttcattttgtcactgagtttgactgcgcctgttcagaaaaagagattttggcacgggcggatgcagaacagctcgatctgtttgcgatgagccggttccgtctgaaagcgggaggcgattcaaataagccgcagctcattctggggttcgcccgcctgaaggagagcgatattcaagaaggcgtcctcaggctttaccgggcggttttcggcgcataaaaaaacccccggaattcggggacttatttaccagcggtccggctctgtctgcaaaatcgcctccagcaggccgggaaacgccgcttgtaaatcatctttgcgcagggaataataacggtgcttcccgtctatacgtacttgggcgacccccgcttcccgcagcactttgaagtgatgggacagcgttgatttagcgacccggacatcagcgcaggttccgcacgttttttctgttgtttccgccaattgtttgaccagctctaagcggagcggatcactcagagcatgaagaacctttgtcagctgtaagcgttcggtttcaggatggtttggaatgttcatgagtcaaatgtaacacagatcatcggcgggtgacaatttaggcggtgagggtttttcctttaccattcgcagcgaaacatgttacagttagttcgatgatattcgaactataacaaataaacccaatcaggaggaataacaatgatcgtcttacaggcttacatgaaagtaaaagcggataaacgcgaggaatttttaggagaagcacaatcacttgttcagcattcacgcgcggaagaaggaaatgtgcaatacgatcttttcgaaaaagtcggtgaggaaaatacattcgttatgcttgagcaatggaaagatgaagaagcgatgaaattccacaacgcaactgaccatttccaaggattcgtggcaaaagcaaaagaagtgctgagtgcgccgcttgacgtcgtccgcacagaactgtcagagtaacgaaaggatgaatgacatgaacgaagtccttcaattattaacagaccaccgttccatccgcagctacacagatgaacctgtatcggatgaacagctggatcttatcatccaagccgctcaggcagcgccgacttccattaacggccagcaatttaccgttattgcggtgaaagataaggagcggaagaaaaaaatatccgaattggctggcggccagccgtggattgagcaagcgccggttttccttttattctgcgctgattttaaccgcgccaaaattgcgcttgaagagtataatgatacaccgcttgagatcacgaacggtttagagtccgtcttagtcggagccgtagatgtcgggattgcgctgggtacggcaacggctgcggctgaatcaatgggactcggcactgtgccgatcggcgccgtgcgcggcaagccggacgaactcattgaattgctgaaacttccgaaatacgttttcccggtttccggtctcgtcatcggccatccggcagaccgctccgcgaaaaaacctcgtctgccgcaagcagccgttctgcatcatgaaacgtatcaagaagaagatttaagaacacatatcgaggcctatgacaagcagatgtccgaatacatgaaaaaacgcaccgacggacaggaaacgagaaactggtcacaaggcatcacctcctactataagcagctttattatcctcacattcgtgaaatgcttgaaaaacaagggtttaagacggataaataagcggatcagcctgccggaacactccggcaggttttttctatttctcaaacaaaagcgttgacactgtgtaaaaatttttgttaatattttcatcatatactcattggttttctgtgaaccgatgggttttctattgtgacgaaagaaggaatctgggcttatgaatgataagaaaacggatattctgctggcggcaagaaagcttttttccaggaaaagcttttcgtcggtttcgatgcaggcgatcgcagaggagtgcaaagtctccaaagcatctttatataagctgtttgaatcaaaggaagacctgctgttggagctgctcgactttaaccagaaacagatggtagccgccgcttcattattgaatgaagaaacaagcctctcccctgaggaacggtttgccaaaaaactgatggctgagcttgaaggcttcaggcgcaatcagcagttttttaatatgctgatgtacggaagcccctcttccattaatgagcgggtaaaacggcatattcacagggcccgctccacctttatctgctggcatcgcgattcactgattcagacgtacggcgaagacattattccttatgtatgggagctggtgatcgtcctgcaggggctcctgagagaatgcatcacgctgattaagctggaaaaagaaccgctcgccctggagccgctcacggagtttatcatccgccatctcaatctcatcgtcgaaaacaggacaaccgaaaccgcattgcctcaggagatgattgacctttatatcgcctccgcttcctcatttgagccgaaagacaaaaccgtattgctggctgaaagcctgaaggaactgaaagaagcggtctcagcccttccggaggaaaaatatgacgccgcaggactcgcttccgcggcggctatgctggagaaagaatcagcggacaaacagccgcgggattttctcatcaaagcgctcatcggttatttggagcaggccggaccgctgcaccagccgcttgcagccgttaaaacattgctcaaactataaagaaagaaggaatcagcttgaataagagtattgaaactgcaccatacaaccgctctgtcattgtcgggattcttttggcgggagcgttcgtcgccattttgaaccagacactgctcatcacggcgctgccgcacattatgaatgacttcaatatagacgccaacaaagcgcaatggctgacaacatcgtttatgctgacgaacgggattttgattccgattaccgcgtttttaatagagaaattcacaagccgcaccctcttgatttccgccatgagtattttcacggcgggcaccattgtcggcgcattcgcaccgaactttccggtgctcttgacggcccggattatccaggcggccggtgccggaattatgctgccgctcatgcagacggtatttctcacgattttcccgatggaaaagcgcggccgcgccatgggtatggtcggcttggttatttcgttcgcgccggcgatcggcccgacgctttccggatgggcggtcgaagcattctcttggcggtctttgttttatatcatcttcccgatcgcagtcatcgatttgcttttagcgattattctgatgaaaaacgtcacgacattacgagaaacacagattgatattttatccgtggtcttatcgaccctcggattcggcggtctgctttacggcttctcaagcgccggttcatcagggtgggccagtgctgaagtgctgacttcgctgcttgtcggagcggtcgcgctgattttctttatcgcaagacagatgaagctcaaaaaaccgatgctggaattccgcgtgttttctttcgggattttcagcctgaccaccctgctcggaacgcttgttttcgcgctgctgatcggaacggaaaccattctcccgctttacacgcaaaaagtccggggcgtatccgcgtttgataccggattaatgcttttgccgggcgcgattgtgatggggatgatgtctccgtttatcggccgggtgtttgacaaaatcggcggaaagggccttgcgatgaccggattcttcatcatcctgctcacgtccctgccgtttatgaatctgacggactcgacgtctctcatttggattgtcgtcgtttataccgcgcggcttttgggaacagccatgattatgatgccggtgacgacagcgggtatcaacgccctgccgcgccacttaattccgcacggcacagccatgaacaataccgtccgccaagtcggcggttctatcggtacggcgctgctagtttccgtgatgagcagccaggccgcgcacgcaaatgcgacaactccggcaaacgccgccctgcacggcatgaatgcggcatttgtcgtagccgcctgcatcgcgctggccggcttcctcctatcttttatattgaagaaaaaaccgcgtcagcccgagcagcagcaggccgttacgcggtaaaccaaaaagaacccgatcacgtatgtgaccgggttctttttttacttctcgattccgtctttaacttctttcaccatttgcgccatggattccaggccgcctcctgataaataccatgtagctgaatcaaggtagacaacatggttgttcttcacggctttcaccgattttacataatcattttcaaccacttgttttgttgaagattttgtgccgatcgctgttccgcggtcaacgacaaacatgtaatcagggtttgttttggcgatatattcataggaaatgctttgtccgtgcaatgaggcttcgatgtttttgtcagccggtttgacgccgaacacatcatgaatgaagccgtatcttgatttagatccgaacgcgctgattttgccgtcgttcgccatcaccactaacccgtttttatccgtgctgcttgtctttttcttcagatccgcaatggatttgtcaattttcgcaagcttatctttcacttcattttctttgttaaagattttgccgatcacttcggtgttgtgcttgaatctgtcaacgtagtttgtatagtcatcatcaagataaatcgtcggcgcgatttttgagaactctttaaaagaatcagattgtctgtgggcgataatgattaaatccggatcaatatccgcgactttttcaaaatccggttcttttaaaccgcctgtattggcgtatttatcacttttatatgaagataagtattttggaaggttttgtttcggaagtcccgccacatgatcctgtaaaccgagttcatccatcgtgtccagcattccgaagttgaatacgacgacttttttcggattcttcggcactttgacgccttctttgttcaggtcatctttgattgtgattgtttcttttgatttgcctgatgttttgtccccgtttccgcatgcagaaacaacaaaaatcgtaacgagcgcgatgaatagcagcgcgaattttttcataattttcacctcatctggtttttaagaaaagtacacaccgatccgctgactgtcaatctcttgaatcgggatggtcatatcataaatatcttcaagcacggaggtttcaatgatctcctccgcaggcccttctttgacgatccggccgtttttcagtgcgacgatatggtctgaatatacggatgcgaagttgatatcgtgaatcactacgacgaccgtttttccgaagtcttccacaagccgcttcaacagcttcatcatttcaacggaatgcttcatatctaaattgttcagcggctcatcgagaaaaatatagtccgtatcctgagcgatgatcatcgcgataaacgccctctggcactggcccccgctgagctgatcgagatatttatcctttaagtcatccagcttcatataactgagtgcctggttgatatgcacccaatcttcatccgtcagtttcccctgggaatacggaaatctgccgaagctgaccaggtctttaatcgtcagcctgatattgatttggttcgtctgcttcaggatgctgattttttttgccagatcgttgcttttacaggccccgatctcttgcccgtcgaccgtgatttccccggaatccgtcttaatcagccggctcatgatagacagcagcgtgctttttcccgcgccgttcggaccgataaatgaggtgagcctgcccttttgaatggatagagacgttttctcaaggacggttttccctccgtattgtttgcttacatttttgacctctaccatgatttattctcctttaacagcagatagataaaataaatcccgccggcaaaattaatgatgacgctcagcgtcgtggaaaacgtgaacactttctccacgacgaactggcccccgacgagcgcgacgatgctgatcaggacagaacctgcgattaaatacgtgtgcctgtaggtttttaaaaactctctcgccagattgacgacaagcagtcctaaaaacataatcggtccgacaagagccgtagagacagacacaagaatggcgacgacaatgagcatctgtttcacaagcttatcgtaatcaatccccaggttgacggcgtgctccctgccgagcgacagcacgtcaaaaaaccgcgtgaaccgccagacataaatgcccgtcagaagaaagacagcaccggcaaaccataaaagatcggtgttgatattgttaaagctggcaaacattttgtcctgaacaacctggaactcattcggatcaatcagcatctgcataaaggatgacagactgttgaacagcgtgccgaacacgacgccgacaagcagaaggaaaaacacgttccgcccctcgcctttaaacatgagctgatacaaaacgagtgacaagagcaccatcagcccgacggagatgacgaaattaagatttttgttcatcatgacgatattcattgaaccgaacaggaacacgatgacggtctgaatgagcatatacagggaatcgaggcctaaaatgcccggtgtcagtatgcggttatttgtaatcgtctggaagatgaccgtcgaaaacgcgatcgctcctccggtgagcatcatggcaagcactttgaagcatcgtctcggcagggagtattcccaattgcccagtccgtagaacaggaagaatccgatacatatcatggcgagcgccgccagcagcgtaatttttttattatgactcatatgcttttctccttaacagcatatacaggaagatgccgctgccgataacaccgaccatcaggccgatggaaatttcgtacgggaagataatcactcttcccaaaatgtcgcaaaacagcacaaaaacagcgcccagcagagcggtgtgaggcaggctgctcctcaggttgtcccctttgtaaatcgacaccatattgggaatgatcaaaccgagaaacggcagcatcccgacggtcaggatcaccagtgaagcgatgagcgacacgataatcagaccgatattaacgacgcgtttgtatttcaggccgagattgacggaaaagctctctcccattcccgccaccgtaaatttatccgcatacacataagcgatgatcaccagcgggatactcagatataaaagctcataccggcctttgacgaccagtgagaaatctccctgcagccatgatgacaggttttggatcagatcgtatttatatgcgataaacgtggcgattgagctgacaatattcccaagcattaaaccgacgagaggaataaaaatcgcatcattgaacttgattctctcgaggattttcatgaaaaggaaattccccgccaacgcgaaaacgaaagcgatagacattttcacaagcggactcgctgacgtaaaaagcattaatgaaatcaaaattccgagccttgcccagtccatcgttcccgcagtcgtcggcgatacaaatttattccggctgatctgctgcatgattaatccgcagatgctcaggctcatgccggcgatgataatgctcaccaaacgcggcagccggctgtcaaacaatgtacctgcctgttctttatttaaatgaaaaatatccagcggcgacaaatcttctacaccgataaatatagaagtacacgccaaaaccgccagtagcaaaagtaagtaacgtagcttcatgctgcctccctgcacccatcacaaacggtatgactgattgccaaacaactcccatatatcccactcgtaatgattatcattatcaacgacaattataatcttatcatctttccaagcgcagtcaatacagttttgctttcaaaagcggtcatccgcgggccgtacactaaattgtcttacaatcagtctatcaagaatttgcaggattttctataacctacatttggctgcttatcattttttgcacatgatgacacgcttgagggaaacaaatctgacaaacagcggcaaaattcctccatgaaaatacaaatgttctccccacgtagaaaaaatccttgatttacatgtttgaaagagagataataaaaattaaatttgtgagaaaatttaaatattaggggatgtaaatcatgaaagttgtaaaattcggaggcagctctcttgcgtcaggagcccagcttgagaaagtgtttcaaatcgtgacggctgatcccgcgcggaaagccgtcgtcgtatcggcaccgggaaaacgcttctcggacgatacaaaggtgacggatctgttaatccgctgtgcggagcattatttgcaaaaaggtgcagcgcccgagcttgccgaaacggtcattgaacggtacgccgccatcgcgcgtgagctgaacctggatttctctattatagaaagaatccgcagtgacctattcgctcttttaaacagctgtaaaaccaatcccgaacaatatatggatgcggtgaaggcgagcggcgaggacaacaacgcgaagctgatcgcagcctacttccgacggcagggcgtgaaagcggaatacgtaagtccgaaagaagcggggctgtttgtgacgaatgaacccggaagcgcgcaggtgctccccgagtcttatggtcatttgtaccgtctgagaaaccgtgaaggcttgatcatttttccgggatttttcggttacacgaaggagcatgagattgtgacgttttcccggagcggttctgatattaccggctccattctcgccagcggcttaaaagccgacctgtacgaaaactttactgatgtggacgccgtctattccgtcaacccgtcaatcgtgcggcatccgaaagaaattaacgaactgacgtatcgggaaatgcgtgagctctcctatgccggattttccgtttttcatgatgaagcgctgattcccgcatttcgggccggcatccccgttcagattaagaatacgaataatccggatgcgaaaggaacacgcgtcgtcagcagccgtgacaatacgaacgggccagtcatcggcatcgcaagcgacacgggcttttgcagcatttacataagcaaatatttaatgaaccgggaaatcggtttcggccgcaaagcccttcacattttggaggaagaaggattgacgtatgaacacgttccatccggcattgacgacatcacgatcatccttcggcacaatcagatggactcagaactggaacacaggctcgtcacccgtctgaagcaggaacttcaagcagatgaagtcacagtcaggcacaatctggcgctgattatggtcgtcggggaagcgatgcgccataatgtcggcacaaccgccagggcatccaaagcactgtcggaagccggcgtcaacatcgagatgattaatcaagggtcatcggaagtcagcatgatgttcggagtgaaagaagaacaggaaaaacacgcggtgcgggcactgtatgatgaatttttcgccggagtcttactctcataggacaccgcctcttttttctcttgtccactaatatcccttacaaagcagcttcttttacatattgtatggtatagacaatatggaggtgaagctcatgtcaggatattctggagtcagctctttcgctttgatcgttgttttatttatcctgttgattattgtaggtactgccttcgttggcggtttctaaacatcactccgtctatatgaggacgctgcgggttttgacctgcggcgttttcttttgttttccgccgctgtccaagtccggccgcgcaaaaaagactgccgagaacattctcgggcagtcttttcctttgttctggttattttctcctcacgtcattcctctttcagctacatggaattcagcctgatctgtctggcctgcacctgtcactgtaaaaatcgcggcggctgctaaacaaataacaaaccatttagatttcaatttcatacaaaccctcactcctttgtatttgtttccttgcctcttcgactttcagaaaatagtcagaagaaattttaaagcaattttgttcatagtaatatttagctgcttctagtgctaaatcctctatatcggcgtataaatttttatcttccaggtaacggaaacacgcgctgattgtttcctcatccggtttcgcctgatacagagcctgcagccattcgaattttaccgtataaacgggatcgtctgtttctttagcatattcatatccccgcttgtgatattccgacgctttttctttttttccgagtttaaagtaaatgagtgtgattagaaaatatgcttgaggaagagaattgacgattctttgtgattcaaatgtatcgaccgcccgttcaaagtacggaatcgcttcgccgatgcggtcctgattgtagtagcacagtccgaggttatacagcgccctcccgacaagctgcgctttttgttctttttcggccatttgcagagcgtgctgaaaatgtttggccgcctgttcaaagcgcctttcatccattaaattgacgccgaatacaaaatggcattgaatgatccggacgttatatgtgtcctgctctacgtaaatttcataagcgttttttatatgtatcaaagaaaaatacgtttgtttcatatgataataagcttcggccactttaaaataaaactccgcccgttccacgtggtccgatacgaaggccagttttttctcagcttgtttataatatgtaatcgctgagataaattctcttttatcaaattcaaacatgcctttgaaaaagttgacgtaataatcgagaagccctttgaggccggcctggctgttatcaatgttatcaagaatttccgacagggtcggctggtcttctatcttcagtttttccagcggctccaagtagtccagcatcagctgatggcgaaattccatgagggaataataaagcactaagttcgaatcaggctccatatggtcaagctcttgtttgatctcggccttcaagatctccgcatccggcacgctgaatgttctgatgtatcgataccactcgttaattttctgcccgactgctgaagaaggaattaacccgctcttcattccttcaccctccccatccaagacctgtttaccagttattttatcacgtttccgtctctttccatcccgaaaaacacgcaaactttgtttcggcagagcgcaattttccgagtggagttaaaacaggcggcggccagacgggaccgccggtttcaagatgattcatttttcgtattcagcggaaggcggattgtaaaggtcgtgccttttcctttttcgctgtcaatatctatcgtgcccttgtgcatttcgacgagctgcctgacgatggacaggccgagtccgtattcgccgtatgccgtattcgtccgggacacgtccgccttataaaaccgctcccatatatgctcaatttcttctttggagatgccgatcccggtgtcttcgatttcaatcaccgtttctttatagccttcatacccgcgcagcgtgatgtctcccttttgcgtaaattgaatgctgtttttcgtgatgttgacgagaatctggatcagcctgtcataatcggcgaatactttgacgccgtcctccacttgaatccgcagctgattttgcttttcctccgcctgctgattgagatgctctttaataatttcaaacacctcgatgagcggcagactgagcttgtccagtttgatttgctgggatctgattttttcataatccaggttttctttcacgagcctgagcatccgcttcgtttcttcgctgatcagcgagaagcatttctctttatctttttccgggatggtgttgctgttaagcccctccacaagtccgttaatggtcgtcaaaggcgttctcagctcatgggagacatcggcgataaattggcgcctccgtttttcaaggcggtcaatctgctctctcgattgcttcagatttttggccatgatgttgaaatcggacgccagcatgccgatttcatcgccgccgctgtttttaagagaaatatcataatcaccggatgccacttttccggtcgcatcccgcaatgtctgaatccgcttgacgtgaaatttagataaaagccagctcagcagaatcgtgatgataagggtgctgatgatcgcgtaaaacatatagcggttgacctggctgatcatctgctcgacccctctgacgggagacacgagcagcaccgcgcctttaaattgatcgttgataaaaagcggctttgcgacaagcgatacttctaaaccttctgtattaaaacggttcatctccgctctgatctgaacggttttcccttgcttcagcatgtgccactctttacttttcagcttctcgcgcggcggcatatcgtcaggaaaaaagtaaggccgctgatgttcatcgaaaataataaacctggtctcgcgcgtttttaacatgtcctgatacggatacaggcggcgcagatcaagatcgcggccgttcagctcacttgtgatctgctgggcgtaagatgacagctcatccactttattttgatacgcaaaatctttcacaaagtgcgaaaacagggaaatgatgatgaaaaaggccaaaatcaaaatgctgacatgacttaacagcagctgatataagtatttaatcctcatcaaatttgtatcctaccccccacaccgtgtataaaaacggtttttcctcactggacagttttttgcgcagccgtttaatatgaacatcaaccgtacgttcatcgccgtaaaattgatagccccacacctgctcaagcagctgctctctcgaaaaaacctggcgcgggttttgtgcgagataaaagagcagatcgaattccttcggcgtcagattctcgacaggttttccgtgcagaaacacttcccgcgtcttcttattgattgaaaaacacgccgtttcgatcaagtcgtcgcttttaacggcctgccccgtcgcccggtatcttctgatcaccgctttaatccgcgctactagcgtcagcgggctgaacggcttggtgacatagtcgtccgcccccatttcaaacccgatcacctgatcagactccgtgtcctttgcggtcagcataataatcggcacactgctcgtctctcttattttccggcagatcgtcactccgtccatggatggaagcataatgtccagaatgaccaaatcccagtcctctttcgtgaaacgctgatagccttccactccgtcatggacaaattcggcttcaaatccttctttaaaaaagaacatttccgtcatggtgcatacgcttatattgtcttctatcattaatatcttcattggttcctccgcttatcttcacgctttttcttataatagcaccattttacccgggtgttttcgggtttcacaattgttagtttttatttcatcacccggaaatagtttgttcatatttttttcatacatttctcctactatatacatatcggatggccggtgctaaagaaggccggttttacaagatctgacacccacacggaggaacagacatgaactttataaaaagagccttttggagcatgaaggcaaaaaagggaaaaacatttttgcagctggttgtgttttcagtgatttgcatttttgtcctgtccggtcttacgatccagtcagcggcaaagaaatcaagcgaactggcaaggcagcagctcggcgggagcgtcacactccaggctgaccgccaaaagcaaatggcgcagcagcaaaaagacggtgaaaagaggacgtttgaatcaacgccgatttccgtctcagatgccaagaagcttacatctttacagcatgttaaaaattacaacttcctcacgacagcgtcagcaaatgcagaaagctttgatgcgataaaaagctcaggcgaatcagccgataacagttccggcgccggccgttttcaaggcggcggaagacagatgatttcagctgatatctcgatcgaaggcgtgctctctacggcattgcttgatgatttcacaggcgggagctcaaaaatcactgacggccgcgccatcacaaaaacagatgcggacgcaaaagtcgccgtgattaatgaaacgctggcagatcaaaacaagctgaaggtcggcggctccattaccgtttcctcagcagcggatgattctgtgaaaacgaagcttaaaattgtgggaatctataaaacaacatcatcaggagacgatcaggcacagcattttttattcttaaatcctgacaataaaatctatacgccttacaccgccgcggcggcgttaaaagggtctgataacaaaaacaaaatcagctcagccgtttattatatggatgatgccaaatatattgactcattcgttgcggctgcgaaaaaaacatctatagatgataaaacctacgcgctgacgacaaatgatcaggtgtatcagcaaatggtcggcccgattgaaaatgtcgcgtcattttctaaaaacgtggtataccttgtatccatcgcgggcgcggtcattctcgggttgatcgtgatgatgtcgatcagggaacgcaagtatgaaatgggtgtcttgatggcgatcggcgaaaagcgctggaagctcatcggacaattcttaacggaaattctggttgtcgccgttattgccatcgggatcgcatccgtcacgggcagccttgtggcgaatcagctcggaaatcagcttctttcccagcaggtcagctcagccgatgattcacagcagcaaacaagcggctggggcggcatgttcggtcagcattcatccggcgcggatgtcatcagtacaatgcaggtaaacgtctcgctgaatgaccttctgattcttggcgggatcggcgtcgcaattgccgtcatcgccacattactgccgtctgtatcagtcatgcggcttcaccctaaaacgatcctgaccaagcaggaataagaggaggcagcataatgagcctattaacctttcaacagaccggctactggtaccaagacaaatcacagccgctgttccaggatataacgatcagctttgaaaaagggaagttttatacaattgtcggcgcctccggaacggggaaaacaacgtttctgtctctggcgggcggccttgacacacctaaacagggaagcatcctttataacggaaaagacatctccaaaattggattaaccaaattcagaaatcaatatgtctctatcgtctttcaatcttatcatctgatcccgtatatgacagcgctccagaatgtcacaacggcgatggagatcaccggctctaaggagaacaacaaagatgcgttcgcgctcagcatgctgaaaaaagtcggcatcaccgaacagcaggcccgtcagcgggtgctgacattaagcggcggacagcagcagcgcgtttcaattgcgcgggctttctgctgtgacacggatttgatttgcgcggacgagccgacgggaaatctcgacgaggatacgtcaaaggaaatcgtccggctctttcaggatctgacgcataaagacggcaaatgcatcatcatggttacgcacgacgaacaaattgccaaagtttcggatatcaacatccgcttatcaagaggaagtttcacggtcaaagaaaacggcacggccgtttcctgataccgcgcccctgccagcgcagacaggggcgcaccctatatccccctattcaatagaagtgaacgtaaaaagagcgagggctgcatccccccgctctttttatttatatcagctgtaaataacggtccatatttgattgtccggctgctttgatcaattcttccgcctttttctcttctcccggcaaagcgagccggagtttgtcttcaatgtctttttcagaaagaccgtttcccggcgctcccttcggacagtcgatacgtgtttcatagacatgaccgccggaagccgtgacccgtacaattgtaaaacggcccttcggaacggcgttgtcagccggctgaatttggtcatcgcaactgcggtgaatccgctcaaatcctttttgaagggattccggaatcggctcggatgtgaaatgttcaactgaaaaatccttaccgtgcaaagccaaggtgatcacatattccacgctgaatcttcccgcttcgcctgttttcggacgccgttctgtcaatgcagcgtcaccgcccggcggataaatcacgtcgatccgttccgtttggccgaaagtgagaccatgttcggccttcagcttgagaatggcgtccgccgcatgatgagccgccgaacaaaacggataaaccttaaaccaaagtcccgggctcacaatccgccaaggttttccccacccgcttacaaggagggtttctgcccgttcaagatcgccgtacagtccgaaaaaacctttctccccgtcgagcgcatgaactgagccgccgaaaccggcctttgcaagctttacggcgaacaacccggcttgagcggccagtccggcgtggagcggcttcatttctgtcccgaattgcactctcatgcctccggagcgggcagccgcaaacccgattgctttctgcaattggttttgattcagattctccgcgaatccgacggcgcatgcggccgcaatggcacctaacgttcctgtattatgccagcctttctcgtaatgatgccttccagctgactcgccgagccgcgccatcacttcgattcccgtcacataagcaccgagaaaacggcttttgtctatacggccggctgatgcggctgcaatcaaagccggaaggatgactgcgctcggatgtcctcttacatcagaatgaacatcatcaaaatcaagcgcatgtgcgatgaatccgttaatgagcgcggattgggacggcgtggttttttgatttctgccgataagcggcgctatcggcaccccgccttcttcttcggccagttttaccagcttttcaactcctttatcccgtctccccgcaaaagctgccgctgtaaaatcaagcagtcctttgcgcgcttctttcatcgcttcagcggatgtttccggcacagacgacatgacggcctgagcaagtccggccgtcagattttccgtattcattccgtctgctccaatacgttgacggcaagccgggcgaaaaactcagccgctgccgggagcgctttttcgtcgagtgtgaaggcgggatggtgccattcttccgttccgtttgttcccatccagacgaagaagccggggattttttcttgatataatgcgaagtcttccccgccgggcgactgttctgcccgaacggtttgaagcccgaggctttcagccgtttgttccgccgcctgtatgaaacgggcgtcgttcatcactgacggaaggtaaggataccagcggaaatcagcctctgccccgaatccggctgcgattccttcggcaacccgcttcatatgtttcggaacagcgtcacgcgcttctttttgaaacgtccggacggtgccttccatttcaacatggtccgggatgacattccaagagctgccgccttgaactcttgtgatgctgacgacggcattataaagcgagctgatatttctgctgacaactgattgcaggccgccgatgatctgtcctgccgcctgaatcggatcaatgctgttatcagggattccggcgtggccgccttttcctttaacagtgatttcaaagcggtcgacactcgccatcagcgggccttctttcagaccgaccgtgccgacggggaggtcaggtttgttatgcatgccgaatatcgccgatacaccgtcaagcgcgccggcttcaatgacctgtcttgctccggcggcgatttcttccgcgggctgaaaaataaaccgcaccgttcctttcagctcatgctttctctcatttaataaaaaagccgtgccgaggatagatgccgtatggaaatcatggccgcaggcgtgcatcacgccgctgttgcgcgaagcaaacggaaggtttgttttctcttcgatcggcaatgcgtcgatgtccgctctgacggcgatgacggggccgcttttgtctcctttgatttcagcgatcactccggtttgaagtttcggcacatcaagaaccgtgattccttcttcctccagccagcggcggattttattcgtcgtttcgtattcctcgcctgacagctcagggtgttcatgaaggtcgcggcggatattgattaaacgtttgtttaatgattcatacgtttcatttgccatttcttcttcttcccttcttagacaagttcggcgggctctcccacttgcttaatgaattttttcgtccgttcgttctgcggattgtcaaacagctcttccggcgttccctgttcgatgatgcgtccgtctgccataaaaataactttgtcggccacttcacgagcaaaagccatctcatgcgtgacgatgatcatggttgtctgtttttcggcaattgatttgatgacttggagcaccccggctacaagctcagggtcaagggccgaagtcggttcatccagtaaaatcgcgtgaggatcaacggccaaggcgcgcgcaatcccgatccgctgctgctgtccgcctgacatcgtaatcgggtagctgtccgctttgtgttctaaaccgacttgccgcaacagatccataccgatctgttccgcttcttttttcggtttcttttgcgcggtgatcagcgcctctgtcacattttgcagggcggttttgtttttgaacaggttgtaattctgaaacaccatcgccgtctgctggcgaagcttatgaacgtctttgcgcgaataggacgctgcattcagctttgcatcaccgatttcaatgatgccgtcatccgggcgctccagcagattcaaacaacggaggagcgttgattttcccgagcctgacgggccgatgatggccgtgacttcgccgcttttgatctcaaggtcgatcccgtcaagtacggtaaggtctttaaatgcttttcgaatatgtctgacttgtatcatcctgagcctcctcctatgtgcgataaggcttgctgatcgcccgttcgagcagatcctgcagcacactgtaaataatcgtaagaatccagtacatgaccgcgacggctaaatacgtctcaaaatatttgaggttgcctgatgcgtacatttttccttgggcgaacatttccatcactcctaatgtaaaggcgagcgatgtttcttttaacaggccgataaacgtatttcccgtcgcgggaagcgcgtttctgacggcttgcgggaaaatgattcgtctgtacgcctgggattttgtcattccgacagacagacaggcttcaagctgcccctcatcgactgaattgagcgccgcgcggaagatttcagccaagtaggcggcattcttcaggcttaacccgataatcgccgcagttaacgccgtcatcttgctcattccgggaaacagctgaggcaggccgtaataaattaagaaaagctggacgagcgtcggcacgccccggaaaaatgaaatatacacctttgacagctggtgaagcacaggaacacgattttttgtgataagcgctaatataaggccgccgatcacggcaaataccatggccgcgacggccattagtaatgtgatcggcaaggcttcgattaacgcgggaaaagctgaaaacataaatccccaatcaatgctgttcattctcgattttcaccgccgtttcttaatgctttgcttctgttgtgatatcttctttaaagtacttttcagacagctttttcagcgtgccgtcttttcgcaggtcttcaatggctttgtttacttttttgcggattttatcgtgagccgcatctttcgcaaacgggaaagcgactttttcatagacaatcgggtctcctgctaatttcagaggcagaccggtctttttgatctgggcgatcaggacgctgcggctgtttacataagcgtcaacccgtccgtaagccacgtctttcagcgtgccttcttgtgtttcatacgttttcatattgatttttttatccgggtccttgctctcaaggtttttcgcgtggtttgagcccagaacggccgccactgtttttccttttagatcgttgactgatttgatgtctttgttatcgtttttgacgacgatttgagtgcccgcatacgaatacggttctgtgaagttatacgttttcttgcgttcgtccgtgacagcgacctggttagagatggtgtcgagtttgccggtctggagctctcccatcagaccgctgaattcaagcagcttccagtccagcttcatgttgatttttttcgcgacggcttccatgacatccacgtcaaagccggtcagcttgccgttttctttatatgcgaacggatagctttgtcccgtggcgccgacatgcagtacgttatcgccgccttcgctttcttttccgtttccgcatgctgataagaccgccaaaagcgcggcagacagcagcaaagcccatgttttcttcttcattaaaatcccgccttttcctattaatatgttaatcctgcaattgtttttttaaataaatggtgatgtgcccttttcctagatccttttcgcctgcacggacgtagccttttcgctcgtacatgccgatcagccacggatgcttgtccgctgtgcccagtgacacgaaaggcgcttttaatgtgtcgcggagcactgtattctccagccactccagcatgtctgagcccgtccctttttttccggtttcaggatcgacggcaaaccaccaaatatgtggaacaccgtacggcccgggattcggcccccacggcatccgcagagaaatcgtcgccagaatccggccgtcttcctccaaaacgtaacaggcgtttttttgtatgttattcaaaacgagttctttatccgccgtggcagcggcaaagttgatgccgagcttgcggatcggttcatacgcccgcagtgtcagtgaaagcagctcatcagcgtctgcctccgttgcgagccggtattgtcttgacatgatgagccctccttcagtcggcatatcggtttgccggtttttccagtccgaaatgttctctgagcgtcgttccttcatactcttttctgaacacgccccgttcttgtaaaatcggaatcactttgtctacaaaaagagtgagaccttcaggcaaaagcggcggcatgatgttgaaaccgtcacaagcttgttttccgacccattcttccatcttatcggcaagctgttctggcgttccgacaaagatatgatggcctcttgaacccgccacatatttgtacagctcgcggatggtcatgttatcgcgtttggccatctcctgaacgagcttgaagcggcttttaacggcattcgacgcatccgcatccaattcaggcagcgggccgtcaagcgggcaggcggaaaggtcgacgccgcccagatagttttgcagaatgttcagtccgacagacggaatgatgaggtcttggagctcttcatattttgcctgcgcttcttcttcggtatcggcgataacgggaaaaattcccggcatgatcgcgattttttcaggatcacggccgaaagaagccgcttgttctttaatagattgatagaattcctgcgcggactccaaatgattttgcgcggtaaaaatgacctccgccgttttggcggccagcgcttttccgtctcctgatgatccggcctgaataatgaccgggcgcccttgaggtgtgcgggcgacatttaacggccctctcacggagaaatatgttcctttatggttcaattcatgcattttgcctttatcgaaaaatgctcctgattctttgtcacggataaaggcgtcttcctcccacgaatcccataatcctttgacgacttcaacgaattcttccgcgcgctgatatctgagatggtgctcaagatgcttttcgccgctgaaattaagcgcggtcgattcaatcgaagatgtgacgacattccagcccgcgcggccgttggaaagatggtcaagcgatgcaaattgtctcgcgatatggaacggttcgctgtatgtggtagacgcggtcgccgtcagaccgatgcgggatgtgacctgagcgagcgccgacagcagcgtaaacggctcaaagcgcgtcagcacattcgggtgtgatttgccgtctattgataaactgtccgccaaaaacagcatgtccaatttcccccgctcagccgttttcgccagttctttgaaataatccaaattcatgctcgcgtccgccggtgcctgaggatgtctccaagaagcgacatgatggccggtacccgcgagaaacacaccgagtttgatttcttttttctttgtcatgatggatctccttctattctgaaatacggttcggaacatattaacatgattaaacctatatttcctagtaattttataagaataaatcaaaatgtacaattgtcacgcaagtttgtcaatgcattaagacaaaaatcatgattttttaaaaaacccggcgcatcggccgggttatttcttcgaaactgtatagacggtccctttgacttttttcttaataacggcaatgataagcagcaaaacggggaacagcacttgaaacggaagatgaatataggtcggcacaacttttaagccttcattcatgtgttccgaaaaattgcttgcgatgctgatggagagaatcagcacccccaatccgaccgggaaggccagctgggacggatttttttctttaaaaagcgtggacacgcccacgacaaccgcatatgtaaaaaggctgactttgaaaaaaccgccgatgacgagcacgagcatgaaaaagacatccagccggtctaaaaactcttccactttaattgtctgtatggtgctcagcagcggaaattgagagcggagcattaagttgacgtccagcacacaaatattaatcgccactgacatcgccaaaaacaggccgctgatgataatcgccagaaatccggttttccgcacctttttccgatcctttaagtaaggaaaaatcatgacaaacacgattaattcaccgaacgggatgaacatcgtctgtttaaacacggaataaatgaccgttcctgcaccctccgctaaaacgggctggagaaatctgaggtttatcgtgcctgagctgataatgaggatcagcccgacggctgtcaggaaatacataatgccaaacagcagctcgccggctctcgctatcacttcaattccctttctgaccgcaaatatcgcggcgatcatcagcatggcattcacaattaaaagcggcgtatcctggtaggcgaaggtgacaagcatttcgccaaaatcccgcaatacgcgggcggcgatataagcaaaatagagaatataaagaagggaggccgcccagctcagatgtctgccgatcagttcgttcatgtaatctctcggagaagactcaggaaaaaattgatacagcgcctgataaacgtagaaaagtccgagaccggtaacgcacccgagaagcacggacagccacgcatcccgcccggccatcgtgcccggcgggatcaataacgaactgcccaattcaaacaaaatgatcataataaacagctgacgcgtgccgattttcgcattttccatacgcttcgctcctttctcctcaaatcaatcatgctcaagcttgtctgagagaggattattccgcaagcccgttcttctgataatgacttccgttttgacatctacggggagatttgggaaatattcttcatcccacttccctttgaactttttccatttgtccggatgcttccgatagatcaggtctccgaagccgacgaagtcattcttatgggcttttatatcttcaatcgatttggtgatatctttctcaagctgcacgctgagcgccttttgcatcgttatcagcacttgcggatcagacagatggaaagggtacctgacagcgtccaccagcccctcgacctgagcatgcacgtgaatatgcggttttccgttcggaaaagtggccgtcacctttgtattctggcgggtgacctgcagactgattgcatgcttcacgttcttccaatccgcattgatgaacgtatgcttgatcctattgagcagccatacagcccccacactgtcgtcatccttaatccagtaatccagcctcccatcctttttgaacaccgccagtccgtccgctgacagcactgctttcggttcagttgtctgcgtattttccatcgtagggccggctttatcgtctccgtgcatttcataacccggaataaacggcgacccggccggagaagcgagatcaatcagaacgtcctgaaggctggttttaatgactctgccgtattgttcctgcgtgaagctgagcgtcttgttcactttattggaagggattttatcaatcggcgtcagcactttaataatgtcttcagccttgcaattatgcgcgatcacaacagttgcggtcgtcctgaattcggtgtcgcggtcaagattgtccagaataaaactgagcccttcctctttcgccagtttttcactgaacaccacgagattcgtatgcgcaaaatagagccttctggacactttcatcgagccttttctcaaagcttccgtcatattgtctccggacaccgaatagacggaaaccggaggccggtctcccgctccgccgccctgcagaccgccggccacgtttcccggattgataatttgcaagtgaaggacgtattttcccgtttcggtccggtcaataccgatggcggagatcaccgctaaatcggtcagctcccttttatcccagcatccggatacaaacataagggaaaccatcgtacaaaggataagcatccatttacgtcttttcattaccgtcgccctcttctacatctttattaaccattcctctggatgtctccggtttcggtctttgatgttccccttggcgcctgttgttttcctgcacgagcagtcccggccttttttcatccgcccataacggggcgcggagaagggaatccttcagcccgcccggggttaaaggagcgagcggggacatatacggaaatccgaatgaacgcaggccgcacagatggacaaacatcatgataatgcccagaatcagcccgtaaaatcccatgaccgccgccgacagaataaagagaaaccggatcagccgcgcagatatcgccatgtcaaaagccggggtcgcaaagctggcaatcgccgtcagggcgacgacgataaccatggctggggaaacaatgccggcctgtacggcggcctggccgatgacaagcgctccgactatggaaacggcggagccgacaactctcggaagccggacacccgcctccctgagaatctcaaaggccacttccatcgtcagcgcttcaatcacggccgggaacggcaccgtctcccgctgggccgcgatgacaatcagcagctgcgtcggaatcatttcctggtgaaaggtcgtcgccgccacataaatccccggcgccaccagtgaaatgaagaaaatcaaaacccgcagcaccctgatgctggtggcgatatcaaatcgtgaataataatcctcaacggattgaaaaaattgaataaataaggccggcgcgatgagaacgaacggcgttccgtccacgataatcgcaaatcgtccttccagcagattccccgccacaacgtccggccgctccgtatgatatacggtgggaaacacagaaaacggcgcgtcttcaatgagctgttcaatgtagccggattccagaatgctgtcgatgtcaatgtgcttcagccgcttgcggacttccttaatcagctttttatcgcaaattccgttaatatacatcagcgcgacatccgtattcgtttcgtgtccgatctccattttttcaacccatacatcaggcgtttttacatacctgcggatcatggaaatattggtttgcagagattcggtgaatccctgccgcgggccgcggaaagagacctgggtgctcggctcttgaatggaccgatgctctcccccttccgtgctggcaatcagcgccttgtcagccccgtcgacaaaaatgagcgtgctgcccgccaccagcccggcataaagacttttccatttttcttcctctttcaccccgccgatcgcaagcgttttatcgtatatcaggcagaccgcttgttccggctgaacggacgggatgtcgattaaatcctccagaagggattggctgacgagctgttcgtctaccaaaccggcgatatacacaattgcggccggaagctcttcttttccgattttcagccggcggatgacgacatcggcactgttgccgaacctctcagacagcttcttcatattttgctttaagctgagggagatcggctcatcctgctctttgtccggctggctgtccgcttcttttctgccttcattgtcacggtcgttttgatcggcttttttttgtttcttctgcttaaaaaatggcggcatatcgcaaaaaacctttcctcgtttttttcatattcttcctgtacggcaaaagattatgcacggcggaaagtctgtataagttctgcgtaatcgaaaaggataaaaagggagagtgatgcgcatgaaaatattgggggtttcattttttttgctggctgcctgtctgatcatttcagtaacgatagatatgctgcaaggtttcagtttctatggagcggtccaaaacaacctgtccgcttttaaattgaccaccttctcagaatggctgatgctgtttttattcgccctctttttaatcagagaaatgatcgttttatataaatcaggtaaaaaagatgcctgacaggcgcacggctgtattgtgtcaaaaaagaacacatccctccttctttcggagttcatgtgttctttttatttttccgatgcagattgttttcagatgacgatatttccgctgtccgtatctgtcgtgtgtttcacaatgacgcctttgataatgcggttgccgatgattttagtacttgcggaggaattggtttggatggcggaagcagaagcggcggaaaggttgttgatggtattgcccgacacgagggaatttgaggctccgttcagatagatgccgatcgggctgcccgccgttcggttgatcgtgagcgtattgtctatgacttcatgcgtgcctgaattcagatacacggtaacgataagcggtgatgattcaaagcggttgctgatgacagaggttcccgaggatgttgaactgaaaatgggatagtttttgtagcttttgaagagatttcccttgatgacagccctggcgtcatttgtcacagatacggcataggactccgcggcgccctgatacgcattcggaatcagcgtatttccttcaataacggcatttccgcctgtgacccatatgccccggctgaacgatttcagcacattttgttttacggtgatattgccggccgacatgctgattccgtccgttacctgattcagagtattattcataaagacggcgttttccgacagcgtcgcccgcatccccgtgcttcgtctcgtttcggaacgtccgttttcaatgacattgccgtcaatggtcacatcttccgcctgatagacggaaatgcccgtattttcaaattgactgattttgttatgggtgacgaggacgctttttccccttacatctattccggtggaaaaaccggtaatcagattgttggaaatgacggcattgctgctgtcctgtccttgtgacacaccttgtccggcgactgcggtccttgagccgccgtctgaccgaaagaagatattccccgaaatgacggtatgtgccccatacccgtagctgattgtgttatcggaatgatttccttcaattaacacattatatccgttaaagttggtgactgagcttgcggcgtttccggaaaagaagttgttgcggaccgtaatatgaagagcttcttcataatcaatatcgccttctccgtacgattcaatatcgattccgaatttcggagccgttccgttcccttgcccggcgtcttcaatcacgcattcttctaccgtaacggtattgcagccggtgattgaaatgttgtttcgccttgactgcctgatctcacagcggcggatggtcacctgttctgaagtttcgtaatcactgtttgtttttaacccgagcgggctgacaataatgccgtctcccgtaaaatccgaaatcttcacattttcgatcagcacattgctgctgccttcaatacagattccaaacccccattcatgggtcgaacgcaaagggacattggtatacgtgtgttcatcccgttcgccgatgatccggccgccggtgatggtgacattttcccgcctgcctatatagaaagccgagtagccccaggagctgttcggcgccactttaatcgtgcattccggatctaaaacgatggtgagatggctcggcacgttaatcccggcgttccgaaacggctggctgctgtccccgccaagcgtgccgttgattttataggttcccggcggaaaaaacaccgtatgacagccttcgctgacggccttggccaagcattggttgatggcgcccgtcacatcggtttttccgtctgccgccacaccgcaatccgtaatatccaatatacgattcggcaagtgataatctcctccttcctctcttattgtcatcttattccgccatatcccgctccgcctgtacatactttaaattttattaaaaaagtttataaagatagtttagttagataatataacaaaataagtcattggaattagggaaattcgtctatattcaacgttttaatatcttttcattctggaattttttgaattcagtataaattatattgacacaagtattatataagaatatgatttttgtaatacacttttttaagaaagggttggctcaggtggcatctattgataaggactctataacagaaactgtgccgcaacgaggctttttcggtcatccccgcggcttgtttacactgtttttcaccgaattttgggagcgtttctcctactatggtatgagagccatattgctttactatttatacacggaagtcgctcatggcggtctcggctttgataaaacgaccgcagttgccatcatgtccatatacggatctctcgtatacatgtcgagcgtcatcggcggatggctggccgaccgggtattcggcacggcaaacaccgtattttacggcggaattttaattatgttcgggcacatcgctcttgccttccctggcagcacggcagcgttttttaccagcatggctctgatcattatcggaaccggcctgcttaaaccaaacgtatccagcgttgtcggagatttatatacgaaggaagacgagcgccgcgactcaggtttcagcatcttttacatggggatcaacctcggcggattgcttgcgccgctaattgtcggaacactcggacagaagtacaactaccacttaggcttcggatgcgccgcggccggtatgttcctcggactgattgttttcgctcttacgagaaagaaatacctcggcaaagcaggctccaatgtaccgaatccgatttctaaatcatcagtgatcggcacgggaatcggagtggtcatcgcagcagccgttattatcgttctgattcaaaccggctggctgacgatccagcgtgtgattgacaccgtcagtatcctcggcattgtcattccggttatttactttatcgtgatgttcacgagcaaaaaagcgacgaaaacggaaaaatcacggcttgcggcttatgttccgctgtttattgcagcggcaatgttctgggcgattcaggagcagggcgcgacgattcttgctttatatgcggatcagcgcacgagactttcctttgcaggcatgcatcttgagtcttcatggttccagtctctgaacccattattcatcgttattttcgcgccggtgttcgcctggatctggatgaagctcggcaaacgccagccttcaacaccgattaaattcgcgatcggcattatccttgccggattatcatttttagtcatggtgcttccggttatgggcggaagcggcgagcttgtgagcccgctttggcttgtgctcagcttccttttggttgtgcttggtgagctttgcctttcaccggtcggtttatccgtcacaacgaaacttgcgcctgccgctttctcagcgcagacgatgagtatgtggtttttaacaaacgcctgcggtcaagccctgaacgcaaaagtagtcggtttgtttgataagatttctgaagcggcctacttcggctcaatcggtcttgtttcgatcattctcggtattattttgattcttctgtctcccgtcattaaacgggcgatgaaaggcgttcaataacagataaagaaaagcctgcggaatcgtccgcaggcttttttgatgcgtctattgttttaactcctcaagcgtttctctccatctcttcaagacatcttccggttcgtggagctggatggccggtccggatgtcagatccgcgtatttcgcccgatcttccttgacggtgatcacccggcagctgaaccgttcccgctcgtgtttcgcctctttcagcggcggaagcgcctcacattccaatgtgacgtaatatgcggctcctccgtgccaggcgatgaaaagagcttgtcccgaatgcagcaggctgcttacggtcgtcgtgtttttccataaggcgagccggagatttgttctgctcacggccacgatttcaccggcgctgatcatggccgcgtgcggacggccttcttttgtcacggattggagcacaaatgcgtcgtgctgctttttttcaagctccgtcccgtctaaaagcgtgtaaagcgcctccggcaagtgctccgtcagcattatgcttttctttccgggacagcgggtacatgtgcggccgtctccgtttctttcggatcgattttaaatgccgggttgaatgccgccggattcgtgatgctttccggttcacaggatctccatgtgaaaaagcaggtttggcattggtaaatttcccaggcgcctttgaccggcgattggctgacggtttctccttttttcgattcacagcgcgggcatgttttcattgcaacctcatcctttcttattgattcattaagtccatcagtttttgttcccactctttcgttgtcagcggagaatcaagcggctgcgaataatggcctcttgtttccggcgcggcgggcgtcgtggcgtcaagaatcattttgtgtgtcatccctgccggatcagaccccgggtcaagcggaaggacggacaggtcaggaatgatgactgcatcgtgtttcggatgcattttcgttgagagcgcccacatgacttgcggcaggttaaacggatcgacatcctcatccacgacaatgaccattttgcagtagccgagtccgtgcggcgtggtcagggcgcgcatgccgaccgccttggcaaatccgccgtagcgcgttttcgttgaaatgatggcgatcaggccgtgcgtatacatcgcgttcacggcgacaatctcgttcggataagcttccttgagctgctggtaaagcggcacgcacgtattaatgccgatcatataatcgcactccgtccacggcatgcctaagtataaatgttcaaaaatcggattgtttctatgatatacccgtttgattttgatcaccggcatgctgcggccgccggaataatggcccgtgaactcaccgaaaggcccttcgtattcccgttctcccgcaaggatctctccttccagaacgacttcagcgccccaagggatgtctaaatcagataatttagatttgacgattctgtagggctccccttgaatcgcgccggccatttcatactcggattgatcgtataacagcggagttgacgcagctgtcgtaatcaccggctcacagcccagcgcgatcgtaacgggaagattcacgccgcgttcttcagcttggcgaagatgaatcgcaatatcatgctgaggcacgggctgaatgccgaggcggtcttttccctttacctgcattctgtaaatgccgacattctgcttgccgaaattgtccggatcttcaagatcgcgggaaatgacacacgctttatccaaatagtagccgccgtccccctggttgattctgaatagcggaaggatgtcaaatagattgatatcttccgttatttcattttcatgaaacggcgcggtttcttcccgtttgaccggcatcggaaatgcatcgtaccgtttggcaaactcaaagaattgttcctttacaggcgtatctttcggcatgccgagcatcatcgcgtgattcggccacgagccgatgacattcagagccacctgcgcatggtgatgtccgtaaatattgttaaacaaaagcgcaggggttttatccccgagattgctggctgcacgcgcggcggcacccagatccggctccggttttacctcttcgttgactgttaagagctgcccttctttttcaagagcggcgagaaattccctaaaatcctgataggccattatcagattcctcctttttgtttttcaattccgtaccaccgtttcgcttccggcagacggatgccgaactgatcgagcgtccggaacacaatatggtcgatcaattcatccatgtcagccggcttgttataaaatgccggcatcggcggaagaatgacggaacccatttttgtaagcgctagcatattttctaaatgaatttggctgagcggcgtttctcttgtcagcagcacaagttttttccgctccttcaagatgacgtcagccgcccttgtcagcagattgtcagccattccggtgcggatgcttgccagtgatttcatgctgcacggagcgatgatcatcccgtccgtttcaaacgagccgcttgaaatcgccgcggcttggtctttgtgagaatacgtataggatgcgagtttctcgacatcttttaacgtataatcggtttcatgtgtaatggtgacatttgcccaaggagacacgacaagatgggtttcgatctccgcggcttttaaatattctaaaagcctgatcccgaatatggctcccgttgccccggtcattccgatgacgagcttcatattgacccctcctttacgcttgaaatgtggtgtcaaaaccatcatactcctgatatatccatatgaaaaatattcgttaaatctatgtatcataccttaaaggtataaaagaaaggagcgcgttctcatggatatccggcaattgcgttatttcatcaccattgcccaagagcagaaaatcacgacggccgccaaaaagcttcatatggcacagccgcctttaagcagacagctgaaacagctcgaagaagaattgggcgtcattctgtttgaccgcaataaaaagaaacaaatgacccttacatatgaaggaaatgtctttttgaaaagagcgaaagagattcttcataagtttgaggatgccattatcgaggtacaagagctgaaggaggcggtggccgggacacttgccgtcgggtcaaccatttactgcgccgcgctcatgcttgagaaagtgtcacagatgaaagagcggtttccgcatcttacctttaacatttgggaagatgagcctgtctcactgctcgagcttctggaaacccggcagattgacgccgccgtcaccaccaccttgattaaaaacgacggcattgaatcgaaggagcttgaagacattccgtgtgtattggtgctgtccgagcattcaaaacgactgtgcggtgaaacgattaaactgaatgacatcgcctctttgcctttgatccttttgcgcaccgtcaatggaagaggtgtgtatgaccaagtcctccaagtttgtgaacagtacggtctcgaccttcaggttgtctgtgaatgtcatgactccgcgactctcttgagcctcgtatcatcagggttcggcgccacaattctgcctttgacgatgattcccgtccatatgcgctcgcatgtcaaaacggttatcatcgaagacaacccgtttgtcatgacaccggccgtcatctggagaaaagacagctatctgccgaagccggtcagacagtttttggaattattttgatccggaacacgaagaattcccgcttatgaaaaccaattacttgactcatactaaaaaaaagttatcctttacaattgggagctattttttctcaataaaactactcagaaaagtggggaataaagaagatgaaaaaagcattattcgctttgttcatgatggtcagcatcgcaatgcttgcagcctgcggaaactcacaggacagcggatctaagtcaaaagacggcgatctttgggcttctgtcaagaaaaaaggcgtactgaccgtcggcacagaaggaacgtacgaaccgtttaccttccatgataaaaagagtgacaaactgaccggatatgatgttgaagtgattcaagaagtcgcgaaacgcctcgatctgaaagctgacttcaaagaaacgcaatgggacagcatgtttgccggattaaacgcgaaacggtttgacgtcgttgccaaccaagtcggcaaaacgggccgtgagaaccaatatgatttttcggataaatacacaacgtcaaatgcagtcgtcgtgacgaaaaaagacagcacgattgcgaaagaggctgatgtcaaaggaaaaacagcggctcagtcattaacaagcaattacaataaattagcgaaagaagccggcgcgaaaattgaaggcgttgaaggcatggctcaatcccttcagctcattcagcagggccgcgctgatctgacttacaacgataagcttgccgtactgaactacttaaaaacgtccggcaataaaaacgtgaaaatcgcgtttgaagcaggccagccgcagcagacgtatttcgcattccgaaaaggaagcggcgaacttgtgactcacgtcaacaaggcgttaaaagaaatgaaagaggacgggactctttctaaaatagcgaaaaaatggttcggcgaagatgtttctaagtaacatgccggaacccgtgattgcaacagccattccttgggatctggtgcagcagtcattctggccgattctttccgggggaatctattactcgattccccttaccattctttcctttatttttggaatgatcatcgcgctgattacggcgctcgccagaatgtcaaatatgaaaccattgagatgggtgttcagcgtatacgtatcagcggtgcgcggcactcctcttctcgttcaattgttcatcattttttatctgttcccgacatttaatattacgctggaccctttcccaagcgcagtcatcgcgttttcattaaacgtgggcgcctacgcttctgaaatcatccgggcatctatttcatccgtgccgaaagggcaatgggaagccggttatacgatcggcatgacctatcgcaagacattgttccgcgtgatcctgccgcaggcgtttcgcgtgtccattccgccattatcaaatacatttatcagcctgatcaaggatacatctctcgcgtcacagattctcgtcgcggagctgttcagaaaagcgcaggaaatcggcgcgcaaaaccttgatcaaatcttggtcatctatattgaagccgcctttatttattggatcatctgcttcttgctgtcaatcgtacagcacgtgatcgaacggcgtctcgaccgttatgtggccaaataaggaggtttcgatatgctttccgtcaaaggattaaataaatcattcggacagaatgaaattttaaaaaagatagatatggagatagaaaaagggaaagtcatcgccgttctggggccgtccggttcaggaaaaacgacgcttctgcgctgtctgaacgcgcttgagatccccaatcgcggcgagctggcattctccgatttttcaatagatttctccaaaaaagtgaagcaggctgatattcttcgcctccgccgcaaatcaggcatggtctttcaggcgtatcatctgtttcctcaccgcacggcgcttgaaaacgtcatggaaggacccgttcaagtgcaaaagcgcgacaaggagcaagtcagaaaagaagcgatggagcttctggaaaaagtcggactgaaagacaaaatggatttatatccgttccagctttccggcggtcagcagcagcgtgtcggcatcgcccgcgcgcttgcgattcagcccgagctgatgctgtttgacgaaccgacgtcagcgcttgatccggagctggtcggcgaggtgcttaaagtgattaaggatctggcgaacgaaggctggacgatggtcgtcgtcacccatgaaatcaaattcgcgcaggaagtggccgatgaagtcatcttcattgacggcggcgtcattgtggaacaaggaccgccggagcaaattttctccgcgccgaaagaagaacgcacgcagcggtttttaaatcgtatactgaatcctttgtaggagcgggagaagaagcgaaacactgatttcgcttcttcttttttttggcggttatgctacaatgacaattaatgaaattttatgaaagaagggacctctttgaagcgggaattcttgatgcgctggacgttttattttgccggtctgttaattttgtctttcggggtatcgttaaccattaaaggaaaagctctcggcatcagcccttgggatgcctttcattatgggctttttcagcatttcgggctttctgtcggccaatggtccatcgtggtcggcgcggtcatcgtggctttaacctgcctgttcacaaggacactcccgaaaatcggcgctatcttaaacatggtgctgatgggaatgtttattgatttcttttcgtttctgcttcctgagacgcacgctttttccttagcggccgtgtttttttctatcggattgctgctgatcggctgcggcgtcggtatttacgtatcagcagggctcggcgcgggcccccgggactctctgatgatgctgatatctgaaaaaacgggctggaacgtgcaatgggtgcggaacggcattgagctgacgattcttgccgcagcctggatgatgggcggaccgatcggcgccggaaccattattacggctgttttgacggggctgattctgcgtttttctttgccgcagtcctctaaactgttaacatacgcgatctccgggcgggcaacgtccgttcattaaaaacaaagccgaaacggttttgtttttttattttcggacagctttcgtctgatatgataggatggttttgacaatattttcagacggaggatcggacatgaagatttacggagtatatatggaccgcccgctttctgcaggggaagaggatcggatgatggcggccgtgtccgccgaaaagcgggaaaaatgccggcgcttttaccataaggaggatgctcaccgcaccttgatcggcgacatgctgatccgcaccgctgcggcgaaggcttacggacttgatccggcagggatttcattcagcgttcaggaatacggaaagccgtacatccccgcgcttccggacatgcactttaatatttcccactccggtcgctggatcgtgtgcgccgttgattcaaaaccgatcggcattgatattgaaaaaatgaagcccggcacgattgatatcgccaaacggtttttttcgcccacggaatacagtgatctgcaagcgaaacaccccgatcagcagaccgattatttttaccatctgtggtcgatgaaagaaagctttatcaaacaggccggaaaagggctttccctgccgcttgattcattcagcgtccgcctcaaagacgacggccatgtgtccattgaacttccggacggacatgaaccttgtttcatccgcacatatgaggcggacgaggagtataagctggccgtttgtgcggcgcatcccgatttttgtgacgggattgagatgaaaacgtatgaagagctgttataagcaatccgtcagcattttgatgcctcgcgtgatatcccctgtcttgacgttggacacgttgagtttgatgatattttctttcggaaaatccgataggtaatggctctcaatcggctccaccagcacgccttgcgctttcagacgctgcacaactcttgaagcggaaaggcttttctccagcacgagatgggtatggatcgacgtttgctttacagaaaaaccgccgtactcctgcagcgcgttttggagcagctcggaacgtgctctgtaagaggcccggattttttctttatgccttttgaacatgccgcttttgatatacacttcaagggccgcttgggatatcatcgaacagtcgatatcgctcagctttttatacgtatggaaaaccggggccagcgaatccgggagcacagccgctccaacacgcagccccggaaaaatcattttcgaaaagcttttcaaataaatcacgcgggaagacagatcgtaggcgtacagcgggtctgccttctgattgtcctctaaatctcctaggaaatcatcctcaaccaaataaacgtcatacgcctccgctaatcggacaagctctcgtttttgccattctgtcagagagctgccgagcggattatgaaatcggggcatcgtgtaaaaaaacttaatttcctccgtctgaaacagccgctcgacttccgccatatcaagcccctcagccgtccgtttaatgccgcaggcgggaaggcgcagcgcttcaagctgctccaccatcagatgatagcccggctgttcgattaaaatcttcttttttccgttcggaaacggcatcagagacagcagggataacgcctgctgcacacccgaggtgataaaaatgttccgctcttttgcaaatacctgataatcggataacagcgtctgaagcacccggattaaagacggaagcccctgcggcgtgccgtaaatgaacaaatcatttttatacatatcaatggctttgttgatgcaatgctgaaagtcgcggtacggaaaaatatcagggtccggcgccgaggctgcaaaatcaatgatacctgtttgttctcgctcctgctttttttcatttttaataagatagtagccgcttttcggcacggcataaataatgtgccgtttttcaagctcctgaagcgcacggatgacggtgcttttactgacgtgaaaacgctcggccagctgcctgatagaaggcagccgcgccccttcctgaaaagtgccgccttcaatgagactctccacttctatcatcacgttcatatacttttccatgctgaacctccatctgtaccggtacagtttatcattattctcattgtactgcttcttcccttcccatacaataaaagggagcggccggcgctcgatctcattaaaggagttcgtaaagatgattaatcaaaaccgtttggctgctgcttacctcgctgccattttaaatgcgctgattatcggtttttcctttatatttgtcaagattgcgcttcaatccgccaatccgtttgatatattggctcatcggttcacagcggccttcatctgtgcaatgcttcctgttttattcggctggatcaaactgtccgtcagctggaagaatgtgctggcgatcttgcctttggcccttttatatccggctttgtttttcagttttcaggcgttcggccttttgtattcttcatcatcggaagccggtatcattcaagccgccatcccgatttttacgatgctgttttcgtcttactttttaaaggaacgtccgacatgggcgcaaaagggattcacatgcctgtcagtggccggggtggtatttattttcacaatgaaaggggtgtccgcggaatcggcgagttttaaaggtgcttgcctgatcctgttgtccgcgctgtcctccgccctttacaatacggcagcgagacgcatgacccagcgtttttcattgggtgagctgacctggtgcatgtctgcgatcggctttgcttccttcaactgcatcgctctcttccggcacggagcggaaggaacgatcgggcagtattttctgcccttccgcgatcccggttttatcgcagcgattctgtatttaggcattttgtcttctctcattacatcattgatgtcaaactacgcgctgtccaagattgaagcgtttaagatgagcgcctttaacaatttttccgtcctcgtgacgatgcttgcgggtgtcctcgttctccatgagtcactccgctggtatcatatcgccggcgccgtctgtatcgtcatcggagtcttgggaagcaatgcttcaggacggcggaaaaaaaacatattacgacatagggaaaaaatgaaaggaaacgaagacggaatatgatcaacacacgaaatgaaaatatctatctcgcgggctgcttaacatttgccgatgtaagaaaacactttgcttatcatcaaggaaaatccgcggctgtctgttttttgattatgctgctggcttctgccatctgttttgaaatgaacggcccggttacaggcggcacatggggcgtcagagctctcctgaatttccttgcagctgtgattctctctttggcagtcacggtgatcgcaacggcaatctcattcttccgtctttatagaacatacaaaacgaatcagcggctgaaatctgccagaagtattacgattcatcagctcggaatcagccaaaaacaaaaaaacgcaagcattctttttgaatgggatgaactgctctcggctagggagcacaaagatatgtttcgattacaaacatcgggttacggaacacttctgctgccgaaacgacttttctattcgcaaaaagatatcgccgttttcaggcaaatgctccgggaaaatgtgaatgggaaagtaaatgtaacagaataaaagacaaaaaggagggtgtccccctccttttttgtcagcctgatatttccgcctgtttctgcagctgctttgcttcctgataaatttcttcgaacagatccgcgatgtgttcttcttcaacacatgaaaatgcgattcgcaaatcggtttcattaatggatatcgtcccgattcctctcttttcaagcaacgacactctcaattcgccggcgtttatgtctttcagccggacacacatgaaataaccagagttaaacgggtaaggcgtccatacgtcatcatagtgcttgttttctgcaagaacggctttcactttgtcagcccgttttttcatgatgttatatttcagcgatttttctttctcgtattccggtgactgcatcgcccgcagcataaacgtttgggacgggtgcggggcgcttgaaatcgttcccctgataatcccttttgttttttcctcgagcacgcgcagcgctttttcgctttttgtgctgtacgtaataaaaccgacgcggaagccccacgcgtaattttccttcgtcgcgccgtctattttcacgcaaagcacccggtcgtgcacttgggcgagtttgctgaagatggattcctgaatggccgtttcatcgtaaaacagattgtaatacgcatcgtctacgagcacgacaatctctttgccggcttctgccgcctccaggatcacgctgacgatttctgacgcttcctcttctcccggcgtgtagcctgtcggattattcgggaaattcagcacgacaatcgccttttcttcctgctttttcagcagctcggacagccccgccgcattaaaacgcccatcctgctgaaaaagcgggtaggtctcaatggatgccttgcgccggacaccgaaaatgaaattgtaatttccccaatatttatcaggcagaagcagcgtatccccttcattgacgaacaagtcggcggcaatgctcagcccgtgtgttaaagcgtttgtcacgatcggcgtgctgatgtctttgccggctaatgaaggattttcgagacgcatttttttcagccattcctgtctgagcggctcttttccctgcggcggagcataatcgtagatatcatcggggttataggcggacagtgtctcttgaatatgggaaaagtgcatggactcgccctgtgaggtggcaatcccgatcgtggcattatactttccggccttggctttcgcttccgccgattgtgtcagcacccctttcggataaaacaactctctgcccaaatcagaaagcatatgaagcacgtgcgggttttcttcagataatgttctgttcagctcttttgctgcatcattcatgtacgacaatcccttcaaaattatattccatcaaatcataacataaaatttttgataaatgagaaaactcgcgggcggattttgttacaaaaaacagacagcgaatgctgtctgtcatatcctataacaattggcctgcagtgctcctgttaataatctcatagattcgttccgccactttttcagtttcacttaatatgaacatgtggccgtccgaaaactcatgaaatacgggattgtcggcccattttttccatccgtccgcatctttgatacattttttatctttccgcccgttaaatatatggacgggtgattgaatgatgtgagaatcagacggacggaagctttcaagcgcgcggtagtcggatctgaaagaaggcaggaaaaatgacatgacttccttattctccactaactcctgcggcattccgccaagctcgataatatgggcgagaaatttttcatcatcaagatgagacacttttttcctttcaacatgcggcggctgaatggctgagatgatcacggcctgcgggtaaatgccctcccgctccagcttttgcgccagcctgaaagcgaccatgcctcccatactgtggccgaacagcacaaacgggcggtcgggatggagattcaactcctgcttgtataaactgacaagctgttcaaaatcctcaacggcggacatttgatttgttccgtgtcccggcggttccgcggcaagcatctcacactcaccttgaagataggtgtggagcgggcggaatgatgcggaatagcctcctgcgaacggaaaacagataagctgcgttttttccgtggtatcgaacgatttaaagagctggaccattggcgggcttcctccttttctatcgtgaagttgtcagcttcagatgttccttccttaggaattcgagcaaatatgccgcattcctttcgagacattctccctgaagcatttctgcgtgagtaccgcagccttttttcacacggtattcacctgtcgtggcttcctcccacgaagcgagccacggcggcatcgcaaagtccggttctgacgttaatagatctatatccgctttgaccctgccggtgctgacggtatgcacaaaataagaataaaacgcgtttgtttttttggcgagaccttctttgacggcttcgttattcagcgcttcattgtcccggtttaccttcatcagcgcctggacatcactttctacggtgcggccttccaagtcgctgacgccttgttttttataggaatcaaccatgatcagccgctccactttacggccttcggcttcaagccgtttggccgtttcaaaggcgagcgtgcagcctgccgagtatccgaacagcttgaccggtccttccggctggagctgattgatcagctctgtgtagcgttcgatgcggttgtcttcctcgataaaatcaaacgcacagattttatagccggacagctgttttgccagcggctggtacatcagcccgtaaccgagaaccggcgggaacgcaaacagtgtgtcagactgatttttattcatgatggtgagatctttcattcctttttcttcaccgtgaagcagataaccggcaatgtctgcgattgtcgtcgcttcgaataacagctgcaccggaatgtccgtaccgagctcttttttaatgcgcgacgctgccgtcatcgcttttaaggaatggcccccgagcgcgaagaaatcatcatgaatcccgatctgctgtctgccgagaatctcggaccagatgtgtgcaatcgtttcttccgtcgcgtttcgaggcccgatccattctttcgccgcctgagcctgatccggtttcggcagctgccgtttattgaccttcccgtttgtcgttaacggaagctcctctaagaaagtaaaggtttgcggcaccatgtaagcaggaagctgttttttcaggtgcctctttacgtcttcagctgaaagcggcgtccggttcacgaggtaggcgttgattgatgcatctccagactcatggcggtccgcaacaacgaccgcatctttcacacccgggtattcctgcagctgcttttcgatttcttcaagctcaatccggtgtccgcgtattttgacctggtcgtcaatacgcccggcgtattcaattgttccatccggcagccagcgtgctaaatcccctgtgcggtaaagcgtttctcccggcttgaacggatttgggataaacgtttgcttcgtcaggtcatgacggttcagatatccttttgatacacccattccgctgatgcacagttcaccgacagctccgaacggctgaagctgattttgcccgttaagaatataaacactggcattgctgatcggctttccgatcggcaatgaggaaatggaatccggtatgtcgtgcacgacgtgagctgtcgcaaacaccgttccctcagtcggcccgtagcaattaatcagcttgccaggccccatgatctcaagcgcctttctgacgtgaggcactgacgcgcgctcacccccgaataacacacagcgaagccccttcagccactcctctcccgcatcggtgagaagattaaaaagtgcggttgtcgcaaacatgacattgacattctcctgccggatcagatcagtgagccgttctgtatcaagcagtgtatgttcatctgcgataatgagccgtgccgcattcagtattgatgcgtagaaatcaaaggtaaatgcgtcaaaggcgtaattggaaacagataagaacgtatcttgttcagaaaatgccatgtagtctacatgcttgaccaatccttgaatattggcatgagtggtgatattgccctttggctttccggttgtgccggacgtatacataatatacgccggatcatcgggatcaattgcggctgcaggatcgcttgcctgttcctcaaaccgtgctcgatcatcgatgatgagtgttgttcctgtatacggcagctgagccgctttttctttcatctcctgatgtgtcagcagacaggctgccgcactgtcagccagcatgtacgagattcggtcctccggcagcttcggatcaacgggcagataagccgctcctgcttttaatacgccgagaatgccgatcaccagctcaagcgagcgcttcgtgtacaacgcgacaacggtgtccttacccgcaccttgcttttgcaaacggcgcgcaagacggttcgcttcctcatctaattcgcggtaggaaagagtctggccggaatacgtaagcgccggtgcatctggatttacattcaccgcttccttgaaccaatctgtcagaggcttcgcctgatgagtctgagccggcgggtttaagccggtaagcagaagctctctttccttttcatcaacaagtctgatcgtattgacaggctgatccggcttctggatgagctgctgaatcgctgtgagaagctgagattttaagcgcaggataaacgcctcatcaaacacattcccgttataggcaagcttaatcagcatctcatcacctggagaagccatcaggttgagatcataattcgatttctcaaatacatggacgtcctccatatcaaagccgttttcactgttttcttcattttttgcatcctgaagcggataattttcaaacacaatgatgtggtcaatcagctttggctgatcggcctggctttggatatcatagagcggcacatattgatgcggctcagactgcagcgattgctcctgcagctgcttgagcaagccgttaaatgtggtatcctcagacagtttcacccgcctcgggacagcattgataaacagcccgaccatatgttcaacgcctttgatttctgcgggacgcccggaaacgactgtgccgaagatcaaatcgccggactgctggtagcggctgattaatacactccaaaccgcctgaagcgccgtactcaaagtggtatgctgcgattttgcaagctcggtaaatgcttttgtttccgcctccggcagtgagaagagcagctctttcggctcatagccgtccttttgtttctttctttgctccgcaaatgtcgtttgtccttcaaaatcttctaagtacccgcgccagtaatgcagtgatgcttgtttatcctgcttttcaagccacttgatatagtctttatacggtttgaccggcggcaggctgtacggcttttgttcacgcagggcattgtataccttaaacaggtcctgcacgacgatgccgaagcaccagccgtccaaaatgatgtggtggtagctccacacccattcaaagctttcttccgattttttaaaaatggctgcccgcatcggaatatcccgcgtcaaatcaaagcccttgatcttatcctgttctttgtattcattgattttggctgtttgctcgctgtccgttacatgtgtcagatcgatttcttctatctgaaactgacgttttttcaatacgacttggaccggcctttttactttttcgtgaatgaacacggtacgaaatacatcgtaccggtccatgatcacattcatgctttcttcaaggcatttgatattcaagctgccttttactttcattgtcatttgttcgatgtaaaaactttggccgggattcaggagagtatgaaacagcattccctcctgcatcggcgacaaataatacatgtcctgaacctgatctttgctgaattggctcatctgctccgctccccccttctgttatctgtttttgtcacgttaaattctcctcaagcatgtcaaagatgtctcccatttcatccatctcaagatcctgcgcgctgaaatcgctcggcgtaaattctttctcctctttggccgtgcaatggcggatgatcattaagagattgtctttaaaccgctgcatctgtgtttcgacggtgcttctttcatattcttcctgattgtatgagcaggaaatgacgaagcggccgcctgtaaccatcccgctgaagcttagtgcgtataacgcctctgactcttcgctgacttgacgtcccatatcatatggagacggctcaaaccattccgttttcacttcattgtcaaactgccccaagtagttaaaactgatttcaggcgtgacgcctttttctgtttcatcggatgacagataccggagaatcccgtaaccgacgcctttatcaggaacgcgccgcaccgtctcttttaccgttttaatgacggaagagacgccgtcttccttgctgatctgcagaatcaacggatattgggccgtaaaccagccgaccgtccgtgaaatattgacattcggtatgatttcttcccggccgtgtccttctaagttgatgccgactttgccgttttccgtccattcaccgatcgttaagccgagcgcgctgagcagaatgtcgttgatttccgttccgtacggatgatgaacatctgtgagcagctgtgccgtttcttcctcagtcaattcacatttcacggccgccgtatgtttgacgagccgtttgttcggatcatggtctttcggcagcggccggagttcttccgtatctgcctgcgcccaataagccgcctgctttttcagctcttctgattgcgcaaatgtgttcagcgcctccgcccaatctttaaaggagtgggttttctgcgggaggacgatgctgttttgctgctgcgcctgtttataacctgaagcgaaatcctcaagcagaattctccatgaaaccccgtccacgacgagatggtgaaccgcgattaacagatgatcgccttgttctgtccggtattgctccgcttttaacagcgggccgttctccagatcaagacttccctgaagatgatcggcaagccgctgaatctggcttttcagcatatcctcgtcagttccgtacagatcaacgatttcaaagcttgccttgcattctgtgacagggaggtatgtctgaatgatgccttccctttcttcacggtaaaccatgcggagcgcatcatggtgttcaatcaatgcttgcagggttttttccaccaggtccggatcaaagccgtctttcgcgtgaagcatgacggattggttccagtggtgtttgtccgtgaagtttttctcaaagaaccagcgctggatcggcgttaaggccgcttcgccttcgacagggccctggtcggcctgcttgccttccgtccgctccacataagagacgagctcttcgatggtcggatgctggaagagatccttcatctccagcttgtagccgtgctggttcaggcggctcgccatttggatgcctttgatcgagtccccgccgagggtgaagaaattatcgcttacgccgatctggtcaagaccgagcacttcctgccaaatgtcggaaagcagcgtctccatctccgtttccggcgctttgtatgccgcgcttcccgcttcaatatccggttccggcaggacttttttgtcaatctttccgtttgcggtgaccggaagctcgtccatctccacccagaacgccggcaccatgtagtcaggcagcgtgtctttcagcgcggatttgagcgcttcaatatcgtcctgctgaggcgcgacataggcgcaaagcgcggtattgcccgctttgtcttccacggccgtcaccgctgcgtcatgaacgtccgcaagctgggcgaggcggacttcgatttctgaaagctcgatccggtagccccgcactttgacctgctggtcgatacggccgatgtattcgatgccgcactgcgcgttccatttgacgaggtcgccggtccggtacatgcgctcgccgggcacgaacggatctgcggtaaaccgcttcgccgtttcttcttcacggttcaggtatccgcgcgcaagaccgcggccggccacacacaattcaccggcaatgccttccggctgcacctgatcgccgtcgccgagaatataaactctcgtattggcaatcgcccgtccgatcgaaagcgatccttcctccggattgatgacgccgcttgtcgcgacgacggtgttttccgtcgggccgtagttgttgatgatcgtgtacggctgtttcaccgcccgcttcagcttgtcgccgccgacgagaagcatgcggagagaggtattttccagctccataaattgttcggccagctgcgtcggcaggaaggtgatggtcacgccgtgctcttcgaaatagtgatttaagcgggtgatatccagccggatcgcttcgtcaatgacgtgaagctccgcgccgatagtccatgtcgggaacatctcccagatggaggcgtcaaaaccgaagcccgcgtatttggcgcttttatcatccgccgtcatggcgaatgcgtcgtgatgccagaaacacaggttcaccagcgcatggtgttcgaccatgacacccttcggctgtccggtcgttcctgacgtgtaaatcatataagcgagatgatccgccgttgtttccgtctgcgggttcgcttcatcgttttcatcaagcggcaggctcagaatggagcgtccgccgtcaagcagaatcgtttctcctttgtagctttccggcacgcccagcgcttcctgtgtgagaagaagcttggcgccgctgtcctgcaaaatgtagctgatccgctcttccgggtagtcggggtcaatcggcacaaatgccgcgcccgctttcaggacgccgagtacgcccgcggccatttccaaggacggtttcgtcaaaatgccgacacgttcgtcagccgtgacgccgcagtccatgagaatgcgcgcgatgcggttagcccttgcgttcagctcgccgtacgtccatttcgcgccattgtatgccgcggccggtcggttcgcgtagcgggcggccgtatcttcaaagagacggtgaaccgttttgtcccgcggcacagaaagtgtttttcctttccatgcgtcaaggagggcttgtttttcagcatcgctgatcagtgaaatctcaggcagctttctgtccggactttctgccgcttgcttcagaatccgcaggaacccggcgctccacttttcaattgtttcttttttaaacagatcagtcgcatattcaaactgaaggccgagaccttcttgatccgtaaagccgccgagtgtcagatcgaatttcgccgtgccttggtttgactcatacggagtgatgcgcaggttctccagttccagtgtttctttatccggatcttctgtcgtcaccataacctggaacaatgggttgcggctcatatctctcggcaggtcaagctttccgatcagatcttcaaacggataatcctgatgcgccagcgcgtcaagattggtttgtttcacccgttcgagcagcccggcgaaggtctgctcttttcgcgtttcattgcgaagcgcaagcgtattgacaaacatccccggcatttcctgaacttcggcgctcgttcttccggcggtcaccgagccgataatgatatcgtgctgccccgtgattttgctcaaaaagacatggaacgcggcgtgaagcaccatatgaagagtcgctcccgatgattccattaattcacgcaccgctttttccgtttcacgccccgctctgaaacggacggattgtcctttaaaactttgaaccggcggacgggggaaatcggtcggcagattcaattcaggaagctcgccggaaaatgcggagagccaataacgctcatggtctttcatccgttcggcctgctcgggttcattctgccagacggcgaagtctttatagtgcaggttcggcgacggcaggcttccgcctttgtaaagatgagcgagctctttgaccagcatacttctggacacgccgtcggcaataatatgatgcatatccagcagcagcaggtgtttcttttcattcagtctgacaagagcggcccgaatgagcggagccgcactcagatcgaacggcttaatgaatgcctgaatgataagatccgctttctcctcgtccgctgcttcaaagatgtgcaggtcgatgtcagcctgttctgcgatctgctgcatcgggcggccgttttgatcgataaaggacgtccgcaaagactcgtggcgattgatcatctgattgagcgcttcctgaagccttgaaatattgacttctccttccatcagaagaacggacggcatattataactgattgtctcccggtcaagctggttcaggacgtacatccgtttttgggcggatgataacgggtacgcgtctgcactgtcggcaggtgagatcatccgatatccctcagataccgctgatttttcgatatatgcggcaagcaggcggacagtcggctgttcgaacagcgcttttaacggaaccgttttgtccagttcagcctgaatattggcgaggagcatcatgccttttaaagagtgcccgccgtaatcgaagaaattatcgtcgatgccgagcgtatccgtaccgagtgtctgtttccaaatgcggcacagcttttcctccaattccgtttccggcaaggctgaagctgtttgcgccgtttggctgacgcccggtttcggaagggcgtttttatcggtttttccgttggctgtgagcggaatgcggtctacttgtatgaaataagccggaagcatatgagacggcagtgtttcggaaagccgtttgcgaagctcagagcctttcagctcgctgtcggctttataatacgcgcacagttccggcagcccgccttcgctgactgcgagaacgaccgcctcctgaatgccgtttacgcttaacagcacggtttcaacctcttttaattcaatgcggtagccccggattttcacctgatcatccgcacggccgataaattcaatcgtcccgtcaggaagcctgcggacgacatctcccgttttgtacatgaggctgtccgacgaaaaaggatttgagagaaatttctccgccgtcagctgcggacggtgaagatatcctctggcaagccccttcccggtaatataaagctcgccgcttgcgcccggaggaacgagctgcattgctccgtccaatacaagcgcgccggtatttgcgatcgggcggccgatgacgggacgctgctcatattgatcaagacgctccatattgatccgttccgcaatggcgccgatcgtcgtttccgtcggcccgtagtgattgatgaagtcggtatgggcgtatacgtcatgaaacttgcggacatcggacgtgatgatcttttctccgccgagcaccactaaacgaagcgggctgaaacggcgttctgacgtaaaacgggctgtattgacgatcatatggaacaatgacggcgtcagtttcatatacgtaatgccgtttttctgtatatactcaccaagctgatcaggcgcggtgtacgtctctttcggcacaatgtgcagctcgccgcctgcctgaagaatcggaaatatggccgtatagccgagatcaaatgcgtaagaagacagcagcacggatttgtcagcttcggtcaaaccggcttcacggctgaaccatgtaacataattgattagattgcggtgctccagctggacgcctttcggtttgcccgttgttcccgaagtataaataatataggcaagctggtcggcgccgggctccgtttcaagccggtcggcgctttcgttctgccattctccgtcttccattacgaccgtttttcctttataaacggcggccgcggtcatgtttctctcattgacgaccagaagcttcgttccgctgtcttcgagagagtagcggattctctcttcaggagtctccggatcaatcgggagaaatgccgctccggctttcatgacgccgagaatcgcggtaatcaagtcggccgaacgatccatcataatggccacgatgtcctcactgcccgttccgcaagcctgaaggtggcgggcaaaccggttcgagcgttcatcaagctcacgatatgtcagacttattccgcccgcaaccgccgtgagatcaggcgttttttgcgcttgccgttcaaacagcgaaacaaaagtgccctcaggcagatccgcttccgtacgtttttcatcagaaaggagcgcttcccgttcaggagcggacagcaggcttgcgtcggccagctgaatatccggattttcagcgcaggctttaatcagattgacaaaatgagcgctccagcggcggatggtttcgtccgcaaataaggctttcgcgtaatcaaagctcaatccgacctcttctccgcgttcagccgcttctaaggaaagatcaaatttagctacatgatgatgcatggagtatgaagaaatctccaaatctccgagccgcagggccgggatctccatgttctgcatattaaataacacgctgaacagcggactccggcttgtgtccctcgttaacggcagtttttcaattaattcttcaagcggatagctttgatgctcaaaagcttgaaggctcgccgttttcacctcatccagaaattgtttgaacgtttttttgccggcaggatgcgaccgaagcgcaactgtgttgacaaacatgcccggcacgtcttggagatcaggatgctgtcttccggccgtcggagacccgactatgatgtcttcctgccccgaatatttggacagcagcacttgaaaagcggctaacaagaacatgtacatcgtcgtatccgtatcagccagcagcttcttaatctgcgccgtcacctgtttatcaagcccgaagatgacgcgttccccttcaaaactgcgctcggcaggacgcgggaaatcaagcggcagatccaacaccggcagatcgcctttgaacgtatcaagccagtaggcttcgtgctgatcgagacttgctttttcacgctgccagactgaaaaatccttataatgaatctttggcagcgcaagctccgtgccttgataaagcttcgcaagatcaccgatgaaaatgcccattgagcttccgtccgtaataatgtggtgcatgtcaatcagcagaagatgccggtcttcttcaagccggatcagcttcgaacggacaagcggcgcgcggttgagcgcaaacggcctgataaaggcttttgtcagctcttctgcatcttcttcccggccctcggcggtttcaagctcaaacgacacatttttgtgaatggtctgcacgacttctccctctgccatgtcaaacgacgtacgcagtgtctcatgacggttgattaatgcctgcatggcctcctcaagacgctttttgtctactgacccttccagcagaagtacagcagggacgttgtagctcgtgctggcctgtccgagctgattaaggatatacatcctgcgttgtgctgaggaaacaggataatgcttctgataaggcgcttgtcggatcggttcaaactgctgctcctcctcgctctcatgctgcaaataatgcgcaagctcctgaatggtcggcttttcaaataacactttaatcggcacttctttttgaaagtgctcctggattttagcggtcatcatcatggcttttaaagaatgtccgccaatcgtgaagaaattgtcagtcacacccgctttcacaccgagaatgccttcccaaatgtccgcgagtttctgctccgcttccgttttcggcgctacgtattctttttgaacggcttcagcctgaggctcaggcagcgcttttttatcaatttttccgttcgccgtcagcggaaactgattcatctggatgaagtgcgcgggaatcatatattccggaagtgattccgaaagcgttttgcgcaggtcttccggcgaaagggcttggtctgccgtaaagtaagcgcagatttcattttcatccgctttatttttccggatcacagccgcagattccgtcacattctccgcctggctgattttcgcctcgatttcgccgagctcgattctgaaaccgcggacctttacttggttgtcaattctgccgagaaactcgatcgtgccgtccggaagccacttcgccaagtcccccgtccggtatatcatttcatccggtctgaacggatcgcggacaaactgcttctccgttaattcagacaggttcacatagcctcttgccactccgcttccgccgacgcacagctcaccgggcgcgccgatcggctggaggttgcggttttcatccataatgtacgcagtggaatttccgatcggcttcccgatcgggaccgaaccgtcataatcctgatcaatgagaaaactcgtcgaaaacgtcgtattctccgtcggcccgtatccgttccaaagcgacagctccggtgatgcctttctcactttgctgacgatatgcggcacaagcgcatcaccgccgatgatgaggtgccggagcgtgttaaacatgccggcatccttttgggcaagctgattaaacagcggagacgtcaaccacatggtcgtgatccgctgctctttcagaaattgggcgaattgtccggcgtcaagcagcgtctcttttttcaccgggtgcaatgacgctccgttcagcaatgcgccgaagacttcgaaggttccggcatcaaagctgacggctcccgtttgcgccatccggtcttcttcatgaaccggcacgtaattcgaatgtttgacgagcctgatgatatttctgtgttcaatcatgacgcctttcggtttgccggtagatccggatgtatacatgatatacgccaagtcgttgccgccggccggaagattcaagtctgttccgcttaccgtttcatccgcgctttcatccagcatgacgaccgggacttgcaatgcgcccgcttgttcttgatagccctgaactgtcagcacgagccgaatcgagctgtcttccgccataaagcggagacggtcctccggaaaagccggatcaatcggcacatatgcgccgcctgcttttaggacggcaagcattccgacaacggtttccgcagaccggtcgttcataatagcggcggtccggcctttttccagcccgctcttcacaaggtgtctcgccagacggttggccgcttcgttcacttcacggtaggtccattcgcgtcccgcttcttttatcgcgatgcttgcaggcgtccggtttgcctgtgtttcaaacaaacggtgaacggcctcctcttccggaagcgccgttttcgtatcattgaatatctcaacaatctgccgctcttcttcgcctgaaacaagaccgagttcccgcacgggcgcgtcaggcgttccgaccgcggctttcatcatgcgggtcagatggtgcgccgttcgttcgatggcatcatgagcgaaagccgctccgttgtatttgattttgacagtccacctttttcccggatacacgatgagattgaaatcaaagctcgtctgctcaaaagcatgttcaactttaatggaaaagccgagtctttcctccatgcccccgttttccagctctttgtccagcggatagttttcaaacgcgaccaaatgatttaagaggctgccgtccagggcggagcgcttttgaatgtcatagagcggcacataatcatagcgctcggcttccacggcgtttttctgaactgccgccatcacgtccgaaaaggctgcatctttgtcaattttgattctgacgggaattgtattgatgaacagccccgccatcgtttctatgccgttgatttctgaaggacggcctgatacgacggtgccgaacaccacatcgtctgtatagttgtatttgctgagcaccgcaccccaaacggcctgaaacaggttaggccccgtgacttgatgccggttggcggtctgctgaatctgcgcgaccagctcttcatcccagacaaaagaatattcttcattttggtagtctttcttttctgatgccagacggcccgggagcaggctcggctgttcgaaatccgccagtcggctgctccaatattgttccgcctcctcataatcccggcctccgagccatttgatatagtcagagtaaggtttgccctggcttcccccggcgggccggccggcacgaagcgcttcatagttttggaacaggcttttcatcaaaacgcccatactccagccgtccatgacgatatgatgattgctccagacgagatacagctccttctcactgagtctgaacaccgctgctttgaagagaatatctttcgccagatgaaagccctgctgctgcacgccgcgtttatagcgttcaatatattcggtttggcgcgcttcatctaattgactgatatcttcatagtgcaccttcgtcttccgctcggctaatacgacttggcgcggtttttgaagctgctggtgcacgaataccgtacgcaggatgtcatatgtccggatcagctcattgacgcttttttcaaaaagctccagctgaaaacttccgtgaatcctaagctctaattgtgtgaagtaggaggaagaatgcggatcaagcagcgcatgatacagcattccctcctgcatcggtgtgagtgcatacaccttttgaatcgattttttgctcatatgtcacctctgtcttttctgttagagaatttccattaatttatcaagttcatcaagcgtcagatcatcatcgccaagatcgctaggcgtaagctcaggtccgtcttgggccaggcagtgatctatgattttcaagaggtgccctttaaagctgtcactgaacgattgaatggttttttcatgaaattcgagagaatgataggcaaacgtcatcgtcatctgcccattttctataaatccgacaatatcaagcgcattcggcttctctgtgtcagggctcagcgattgtcctgacggcatcccggatcttgtaaataagccggaatccgacatctcattaaactggcctaagtagttaaagctgatatccggatcaatctcaaatgaaagattctctttatgctcaggcgccgttatataacgcagaatgccgtagccgactcctttgttcgggatgtgtctgatgtcttctttcatttgtttcagctgatatgaaagatcgtcggtgtgcttcatctcaaggatcatcggatacatgctcgtaaaccatccgaccgtccgggtgatattcaagccgtcaagaatgtcttcgcgcccgtggccttccaaatgaacgccgatcgtgtcttcacccgtccactctttcagcgccagtccgagcgccgtgagcaggatgtcattcatttcggtgtgataggcttcatgtacgtttgtcgtcagctgttcagtttgttcaggcgtcagagagaagctgaccgttctcgtatgtctcatgcgctgatcaccagactgcctgtctttcggaagctgagtgcatacctctttttcctcaagctctctccagtaatccgcttctttcagaaacgccttcgtatttgcgtattctttgattctctcggcaaattcggcgaatgaatgtgttttcggcggcagcgccggttcattgccttgcttcagctgcgtatacacggacgtaaagtcctccagtaaaatccgccaagatacaccatccacgactaagtgatggattgcgagaagaaggtggtctccatcttcagcccggaagagcccggctttcaagagatgtcctgtttccagtgaaatactgctttgaagacggtctgcttcccgttcgatacggtcctcatggtcttcagcaggtccgttcagctcaaagacgttcagttcaacagacacatcctcaagccctctgtaatacggtttttgttcacgataaatcatccggagcgcatcatggtgcaccgtcaggacatgtaatgttttttctgttatctccggatcaaagccgtctttcgcgtgaagcatgacggattggttccagtggtgtttgtcggtaaagtttcgttcaaagaaccagcgctggatcggcgttaactccgcttcgccttcgacagggccctggtcggcctgcttgccttccgtccgctccacatacgagacgagctcttcgatggtcggatgctggaagaggtctttcatctccagcttgtagccgtgctggttcagacggctcgccatttggatgcctttgatcgagtccccgccgagcgtgaagaaattatcgcttacgccgatctgatcaagaccgagcacttcttgccaaatgtcggaaagcagcgtctccatctccgtttccggcgctttgtatgccgcgcttcccgcttcaatgtcaggcgccggcagggcttttttgtcaatctttccgtttgcggtgaccggaagctcgtccatctccacccagaacgccggcaccatgtagtcaggcagcttgtctttcagcgcggctttgagcgtttcgatatcgtcctgctgaggagcgacataggcgcaaagcgcggtattgcccgctttgtcttccacggccgtcaccgctgcgtcatgaacgtccgcaagctgggagaggcggacttcgatttctgaaagctcgatccggtagcctcgcactttgacctgctgatcaatacgcccgatgtattcgatgccgcactgcgcgttccatttgacgaggtcgccggtccggtacatgcgctcgccgggcacgaacggatctgcggtaaaccgcttcgccgtttcttcttcacggttcaggtatccgcgcgcaagaccgcggccggccacgcacaattcaccggcaatgccttccggctgcacctgatcgccgtcgccgagaatataaactctcgtattggcaatcgcccgtccgatcgaaagcgatccttcctccggattgatgacgccgcttgtcgcgacgacggtgttttccgtcgggccgtagttgttgacgatcgtgtacggctgtttcaccgcccgcttcagcttgtcgccgccgacgagaagcaagcggagagaggtattttccagctccataaattgttcggccagctgcgtcggcaggaaggtgatggtcacgccgtgctcttcgaaatagtgatttaagcgggtgatatccagccggatcgcttcgtcaatgacatgaagctccgcgccgatggtccatgtcgggaacatctcccagatggaggcgtcaaaaccgaagcccgcgtatttggcgcttttatcatccgccgtcatggcgaatgcgtcgtgatgccagaagcacaggttcaccagcgcatggtgttcgaccatgacacccttcggctgtccggtcgttcctgacgtgtaaatcatataagcgagatgatccgccgttgtttccgtctgcgggttcgcttcatcgttttcatcaagcggcaggctcaaaatggagcggctgccgtcaagcaggatcgtttctccgttgtagctgtccggcacgcccagcgcttcctgtgtgagaagaagcttggcgccgctgtcctgcagaatgtagctgatacgctcttccgggtagtcgggatcaatcggcacaaatgccgcgcccgctttcaagacgccgagtacgcccgcggccatttccaaggacggtttcgtcaaaatgccgacacgttcgtcagccgtgacgccgcagtccatgagaatgcgcgcgatgcggttagcccttgcgttcagctcgccgtacgtccatttcgcgccattgtatgccgcggccggccggttcgcgtagcgggcggccgtatcttcaaagagacggtgaaccgttttgtcccgcggcacagaaagtgtttttcctttccatgcgtcaaggagggcttgtttttctgttttattcaccaatgaaagctcagaaagcttcgcagccggattttccgctgcggcttctaacagttgaagccagtaatgcttccatgtctctgccgtttccggtttaaacagcgcggtgttatattcaagcacaaacgttaaaccttcgtctgtgtcctcagccgtcattgtcaggtcaaacttggctgtttttctgtcaaacggatggtgcttcagctcaattccttccatgatcagatcttccgcatttgcattttgcattgagaataccgcatcaaacagcggatttctgctcgtatcacgctgcacctcaaccttttgcagaaggttttcaagcggataatcctgcgcgtcaaatgcatgtaaagcggtttgtttcacttctttaagatagtccgtgaaagttttgtccgcttccggatacgtacgaagcgcgagtgtattcacaaaaacaccgatgacgtttgctagatccgcatgtgaccgtcccgcaaccggcgagccgacaatgatgtcatgctgtccgctcagttttgagagaaaggcgctgtatgacgccagcagcaccatgtacatagtagaatccgtttgtttcgcaagactgcgaagagccgacgtctgttcctcagtcagagaaaagaccagcttgtctccttcaaaggtttgcacggccggacggctgtaatcagccggcagcgtcaataccggaagctcgccgtcaagctcccgaagccaatgctcctcctgcttgcggtactgctctgattgaataaatttctgctgccataccgcatagtctttataatgaatccgcaacggctcaagcgtttcgccaccatacaagcgggacagttcatctatcagcacgccgactgaagcgccgtccgaaatgatatggtgcatatcaaacagcagcaggtggtcatgttcagccagcttgaccagtcccgttctgacgagaggaagctgatccaggcggaacggccggataaagctctgaataatccgttcagcatcttcttcagaggcttcataatattccatgttgatatcagcttccgtccatatgcgctgaaccgtttctccatcctgtatgtcaaatgtcgttctgaaggcttcatggcgttctgtcagctgtttcatgacggatttcagcttttctgcatcaagctttccttttaagcggagcacagacggcatgttatagcttgtttcagcgccttccagctgctgaagcacgaacatccgcttctgcggtgaagaaaccggatacgtttcccgctcggccgccggtgcgatgctctcagccgccttccgctcagccccttcaatcagctgcgccagccccgcggccgtcggagaagtgaacagatcctttaaggtaagctgcgcgccgaatgtcttctggataagggccagcagtttcatccccgctaacgagtggcccccgatctcaaagaactggtcatggacgccgacccgctccatttgcagcacctcagcccaaatatccgccagtttttgttctgtttcattgcgcggcgccgtatatgacacggcattcgctgcggtcacatccggcattggcagcgcccgcctgtcgatttttccgttccctgtaagaggcagttcatccaattgaataaagacggacggaatcatataagccggaagatccttcgccgaatgctccctcagctcccgggaagagatttccctgaggccgacaacatacgcgcaaagaagtttgtcacccgcgccctgatccacagcgagcacaatgcattcctgaatctggtcatgactttgaagctgatgctcaatttcgccaagctcaatccgctgaccgcggattttcacctgatggtcgatacgtccgataaactcgatatcgccattcggaagccatctggccaagtcgcccgttttatacatccgttcaccttccttaaacggatgctttacaaatttttcttccgtcagttcaggacggttgtagtagccttctacgagtccttccccgctgacgcacagctctcccgcgatacccgccggctgaatgcgtccggctgagttcatgatgaagacttccgtattgctgaccggtttcccgatcggaacggagagcgtatcctcttcaatgacatccaccggatggtatgtcgcaaacaccgtgctttctgacggaccgtacatatgaagcagtcttccttttccgactgccgcaagcgcctttttgacatgttctacagacgctctttcgcccccgaacatgattttccgaagcgtcgtcagacaggacggctccatatcaacaagcaggtggaacagggccgtcgtaatcatcagaatgctgacgttctcccgtttgatcacacgggacaggcgtgacatatccagcacggtatctttcgggacgatcacaagctttgcaccgtttaacagcgaaccgaacatatcaaacataaaagcgtcaaaaacgtagtttgacagaccgagcactgtgtcctcttcagaaacagtcaaatagttcgtgttttttaccgtccgcaaaatgttggcatgtgtgacgatgtttcctttcggcgttcccgtcgtgcctgatgtataagtgagattggcaatcgttttggaatcaaacggcaatgctggattgtgagagtccttttcatagctcgcctcatcatcagcaagcacaatgacgccttgaaaaccggccttttccgcaagcggcttgaggctttgctgagtcaggagcacattcgccccgctgtcgcggaagaaatgctgaatccgctgaaccggatgctcaggatcaatcggcacataggcggaccccgcttttaacacagccataatggaaacaatcatatccattgaccgttcacacagaacagccgcggtttttccgccgcctccgaccgaaagaatatgccgcgcaagcatgttggcgcgttcattcagctgctgatacgacagggtttccccttcgaactgtagagccgtccggtcagggttctttcggacttgttcttcaaagatctgcacgatcgtttgatctttcgggtataccgtgcgttccgggttgaaccgctgtaattgattcaaagcctcccgttcagaaagcagatcatattcgctgattttcgcatccggctgagctgccgcgctttccagcagacggacatagtgcgcaagcatgcgatccgcagttgagcgcttaaacagcttcgtgcaataatccaaatcaagcgcaatgccttccgctgtttcccgagcctgcatggtcaggtcgaatttggcgatattgaagtttgtttcatgaagagacagcgtcagattaccgatctccgcaattccgtccgaagcattttgcagactgaacatcgtgtcaaatatcggatgcctgctcatgtcccggggcacgttcagctcctcggtcagccactcaaacggataatcctgatgagaaaacgcatccagcacctgcttgcgcacatgacctaacaagccggcaaatgtctgatcctgcttcacggagcttcgcagcgcaagcgtgttgacaaacatcccgataagcccctcggtatcggagtgatttcttcccgctgacggtgttcccacgatgatgtcttcctgtcccgaatacttagaaagcagcgtatagtatgctgataacagcaccatgtaaagggtggctccgtttttctccgcaagcttccgcagccgttcccgcagcattttcggcagcttggcggacacgcggtcaccttcaaagctttgcacctgcggccgcggataatcagggagcagctgaagcaccggcagttctccgctgaagacttctttccagtacgcccgctccttcttgtagccttctttcgcccgttccgcctgccatacggcataatctttatattgaatgcgcaattcaggcagctgatttccgccgtagatgtcagccagttccttcagcatgatggaaatagacaccccgtcagaaatcaggtgatgcatatcaaacagcagcatatggcgattgtgaccgagcgtttgcaggccgattctgaacagcggcgcctcagataaatcaaaacggcgcacaaagtccttcatgacctgttcattcgttcttccgcgcgcttcgatcatttcaatatgaaacggaacatgctcgccaatcacttgtctcggcgtgccgtcctctgattgaaacgatgttctgagcgcttcatgcctgctgattaaggcagaaaatgcacgctcaagcttttcacggtctaaagcgccctcaatcatggccgcagccggcatgttatatccgactcccgcgtcttcaaattggcttgcgatataagtccgctgctgagcgagcgaaagcggatagctcgcctgcttctcagccggctcaattgcactgaatgccggtccttcgtttcggttttccgcataatcggcaagcgccgcaatcgtcggatgctcaaacaagtattgcagcggaatttcaacgcccatttgcttatgaattttcgtcagaagcgtcattgcctttaatgaatgaccgcctgactcgaagaaatgatcataaatgcccgccttgtccattccgagaacttcctgccagatgacggcaagtgtttcctccgtttcatttcttggcgcggcatattcagatgagctgacagcctgcacatcaagcgcaaacagctttttgcggtccgccttcccgctcggcgtgagtggaatttcgtccgtttttgtaaagtaagcgggcaccatgtaatcaggaaggtgcttggacacatactccctgtactcggcagggtgaaactcggttcctttttcctgaacgatatatgcgcagacatctaagctgccctgctgatccggccgtgccagcacgacggcctgcgccgcgcccggggcttttctgagcaccgtttcaatttctcccagctcaatgcggtagccgcggactttcacctgatcatcttcacggccgatatattcgatcgtcccgtccggcagccagcgcgccatatcacccgtgcggtacatgcggccgcttccgttaaacgggtcctgcaaaaacttctctgcggtcaaatccggaagatttaaatagccgcgtcctacaccgtcacccgcgatatacagctcaccggccgtgccgtcgggctgaagccgctggtgcttatccaatatatacagacgggcgttgccgagcggttttccgatcggaacgtacgccgcctgttgattcattccgttatccgctgacatctgatgcacggacgcatctacgcacgtttctgtcggcccgtagacattcgtcagacgcggcgtcctgcccgattgatgaaagagcgtcatcagctgttcagcaacagtcgcggacagaccctctcccccaatgagcatgtggcgcaattcaattccgctgacatctcccgccgcagccatcatctgcagatgcgcaggagttccgtcagtggcttcaatccggttttgacgataatagtccagcagtgccgagccattcgttacagtcgttttcggcacgatataaagcgtctgtcccaaaagaagcgaggcaaatatctgtttgacggacgcatcaaaatgaaacggagccaaaagcgccattcttaacgtctgctcaccgcattgataaatctcctgctgcagtgattgcaccagatgatgaacttgccggtgctcaatcatcacgcctttcggccgccccgttgtacctgacgtgtagatgatgtaagccagccagtctgattgtgtgctgacaccgtccacagccgtctcatactgaacagcctcgtcaaaatcaatccgttcggcatccgctgcaggcgcctgtattccggcctccgtcagaacagccttcgctccgctgtcctccaaaatgtactgaatccgatccgccggaaagtcaggatctatcggcacataggcgccgcccgctttcaaaattcccaatattgccgcaatgacacgctcagaacggccaagcagcaccgcgacaggagaatcggctgatatcccggcttgaagaaggcgtccggcaatacggcctgactgttcatgcaatgtgcgataggacaatgttcggccttcatacacaaccgcgggtttgtcagacagtgacttcactttctcttcaaacagccccggtatcgtcatctctccgcggtaattcaccggattgccggaggcccgtttcaacagccgctctttctcggattcagaaagaagagtaagttcatcaattatgcgatcaggagatgaaatcgcatcttcaatcagcgtgatcaaacgttcagaaacagattcaatctcttcccccttgaaaatgtcgctgcgatagtcaaaatcaattgtcaatttcccggtgtcccatcgttccttcacatgaattgaaatatcatttgtaccgcttccgctgaaaatagggtctgtcaggaaggacagattctcttttttctgccactgcatcacctggtactccagagccaccgtaaacaatctgctcagcgaacttttcgaagcgcgcaaatcattgacaagcaggttatacggatacttttggtggcggagaattttcatcagatccttcatccggcctttaacgaattccaagaacgactgtcctccgtcaacgcttgtccgcacaggcaccgtagatacgaacatcccgagcatctgcttttctttcgcattcgtccggttccccataaacgtacccgtgacaacgtcatcccggccggtcactttgtagagataagtgatcagagctgactggaacagagatagtacgctgactttatgctcctcgcagaatgaatgaatgcggccatataagtcgtgaggaatttcttgagaaaaccgttttgcatcaagacccgcatctgcctggctccgtttcagggacacaagctccggcacggtctcaaactgcccgttccaaaaatcccgatcctttttaaaccgcttcgactgcacatattcctgctctgtcagcacgtgctcgataaaagaaggaatctccgtttgttcctcacttgctccgcctgagagctccaaataaatatcggtaatcgcattgcccagaatcgtcatggaaatcccgtctgaaataatgtgatgcacattagcgtaaaaccagacctcattttcactgatcgtgtgcacggaaaaacggaataaatcctgatcatataacgccagaggcttgccagcttcttcacgcccccatttggacagctcgtccgcagagcagccggcttgcctgatatctgtgtgcccgatagagagcggacggtattcgctcacatattgaacgggctccccctcatcatcaagccgcagccggattctcatcgactcataccgccggacgaattcctgtatcgctttctcaacgtaatgagcctgtacgccgtcttcagaaatgagtttcccgaacccggcaagatttgaaatacttgtgttcggatagaatttttctgtataccagatacgtttttgagcatttgttaaaggataaaaagttatttccatatgtgtgcgcctcccctttttaagataaagatgtcaattctcccttagaaacagcctccctctatgtccctaactcattctcaagccaaaagaaccacttacctccaaaaacgatcccgattcaatcaccgccgaaatccgtcatccgttcacccgcgcagtccgaaatgcggcatcaaatttatgagaaatcaagacaaaaagccattgattgtaagcacgaaaggtttacctatttctgcatgtatttctatatatctacttacgttcactttatatgaaaatattgtttttatcaccgaaaaatgggtgaaaagtttcatgcggcacaccgaaaaaaattccgacaaatccagagggtattttgcggcatcccgcaatttattttcaaaaatattatttacgtaaaattaaaaatctttaaactataatgaaaatctgtcgaatatccagttatggcagaatgaaaaaaatttacgtacgtaagctgacccggaaaaaaaagcgcaagaaccgaaacagacagtccgaatgttcgcaatatgatttcattaaaccgcaaaaaaagcactctattttacatagagcacttcaaaaagattcctttattgcagttttatcaatgttgattaattccatataatcttttccccacttatacatggcgtccagaatcggcataaggctttctccttgcgccgttaaagaatactccactttcggagggacgacagggtaaacttccctgtgaacgatcagatcctgctccagctccctgagctgattcacaagaattttgtgcgtaatatccggaattaaagctttcagctcattaaaccgcttcgtcccttcttttcccaagtgccacataatcagcattttccacttcccgcctatcacggcaagcgtcaattccttttcgcaattaaacgttttctcatccattcggctcacggacaatgctccttcctcttactttttgtacggtcatcatctattcatacacgcttactttttcacacaactttcatcagtttatactaccacgcagttttgctgaaacaaagcgcattgcctgcggggacagtatcctcaaagtaactattagacttcaaagtgcgtacttctcaacatgcggggcactctatagaatggaaatacataaaaaagaggagtggatataaagtggaattacagctggcattagacttagtaaatatcccggaagcaattgaacttgtgaaagaggtcgaaccatatatagatgttgtagaaatcggcactcccgttgtcattaatgaaggactgaaagccgtgcaggaaatgaaaacagcctttcctcacttgaaagtgcttgccgatcttaaaatcatggatgcaggcggttacgagattatgaaagcggcagaagcgggagccgacatcatcaccgttttaggagcgacagacgactcaacgatcaaaggggcggttgccgaagcaaaaaaacagcagaaaaaaatcctcgtcgacatgattaacgtaaaaaaccttgaaacacgggcaaaagaaattgaccagctcggtgttgattatatttgtgttcacacaggttatgatcttcaagcagaaggaaaaaattcatttgaggaactgacggcgattaaaaaagcggtcaagagcgctaaaaccgcaattgccgggggcattaaacttgatacgcttcctgaagccatcaaacaaaacccagatttaatcattgtcggcggaggcattacgggagctgacaataaagcggatgctgctgctaaaatgaaacagctgatcacacaaggatcatgaaaacgactgaatacttacatgaaatactaaatgaaatatcccgcaccgcagcattaatatccgacagtgaagctgacaagcttgcgaatcagattttatcggcagatcaaatcttcacgtccggagcgggacgttccggctttatggctaaagcgttcgccatgaggatgatgcacatcggtctgaacgcttacatcgtcggtgagacgcttactcctcccctccaagaaggcggtctcgtcatcatcggctcaggctcaggcgaaacaaaaagtctgcttcatacagctgaaaaagccaaaagccttaacggcatcatcactgcattaacgattaaccccgactcaagtctcggcaaacttgcggatcttacaataacgattcccggctctcctaaggaagagaccggcggagacagaaagacgattcagccgatgggttctttattcgaacaaactcttctgctgttttacgatgcggttattctaaaaatcatggagaaaaaagaattgaattcagcagacatgtttacaaagcatgcgaatctggaatgatttgctgacggccttcttatcagatggccgtctttttatcgtcttgttgcgcacggtcatgcagaccaaggttttcgggtcggacactcgcagacgaagatatcctgccggtgagcttatcgctataataagtcaattgacgatacacccgcaaccgttcatttctgaatagggaaactgcaaaaaacactttctgattgaatttttaatgaataaagttgatttgtgcggatggttttacagatattcagctgaattgcggctgagaaatatattttaacagctttacagccggccgattctgctttattcttggaccagctttacagcaattaaaactggaggtgattgatactcttgaaaacattaaaagcactgctgcttgttcttatcatcattgccggagcagtcgcggccctgatcaagggtgatcttttctcagataacgagcagaccgttcagaagagtcattacgacaaagtaatcttatttccgtccgatcgatatccggaaacagcaaagcatattaaggacgcgataaaagaaggacattccagcatatgcaccattgacagagacggagtacataagcggcgtgagcaatctcttaaacatgtgcccgtcaaaacgggatacgatagagatgaatggccgatggcggtttgtaaacagggcggaaataatgcctccgtagaatatatttctccggcagacaaccgcggagccggctcttgggtcggacaccagcttaccaatgatcccgacggaacgagagtattatttaaaatcaagtaaaaaacaggaggaacagcgcattgaataaatcatggaaaccgcaagaactggccatttcttatcatcaatttacaatcttccaaaaagattcagaaccgcctgttatcgattggaccgatgaagccattgaaaaaggatatgcggaagctgacggagctgtttcatttgaggcaaggagaaatacgagggcatttatcgtcctcaggcttaacacaagtgaaccggtaccatcctatgagaaaaaagcgactgttccctttgaggctgtaaaagatggaattgagattgaaagcgtgatgtcaaagcggctttcttttaatattccgaaaggccgatacagccttacctgttattcagtgcctgccgaattatccgatcttcatgcggatacgtatattattgatgcagccgcaatgtaaaagaaatccctgagagaatcttatttctctcagggaacttttataaacttttaccgtttgtttcaattacattctggtaccaataaaaactttttttcctgatccgtttcaaatccttttcatcttcttcatctcgattgatatagacaaaaccgtagcgtttttgatagccgttcagccagcttaacagatccgtgaatgaccagctgcagtagccgatgagatgaactccgtcactaatggcctctctgcactgttcaagatgggagcgtaaatagtcaattctgtagtcatcctgaattgagccgtcttcttctattttatcgaattcccccagcccgttttctgttataaaaaccggcagctcatagcggctcgttatacgccggaggccgatgcgcagacctatcgggtcaatcgtccaatcccaattactcgtcacgaggttcggattctttttcgttttaaacagacccggtataccggtatcctggtttgtccctttctgaccagtcgtgttcattttcccctccgatacaccatcaagaggatttctttcgtacgtaatcgtctgataataattaacaccgataaaatccggcttgccttttgcaagcaattccatatccccggcttcaatggcgggcgcccagcccttttcctttaaataattgaaaggaatttgcggataagtcccccggcaatacatatcaagccaccaatggttcataaattcctctgcgttttcaaatgcagttatgtcttcagggtgacttgtaagcggataagccggtgaataagcgaagctcgggccgatcatgccgccaggaacatattgtctgaaggattcaatcgctttggcattagctaaaaatgcgatatgattggcttcataaaatcgttttctgtcctttacgccgggcggatgtgcagctgtaataaacccgttatgaaaattataattctgctcatttaacgtgacccagtatttcaccttgccggcgaatcttttgtataacgcaatgcagtaattattaaaatcatcaataatttttcttgattcaaagccgccgtattcatccatcagcgcctgaggcaagtcccaatgataaagagtcagcaccggctcaatatcgttagaaatcaattcatcgatcaggtcttcgtaaaatgcgatccctgattcgttgatttcccctctgccattcggaaaaattctcggccagctgacagaaaagcggtaagctttcaaacccatttctgccatcaaggcgatatcttctttataacgctcataatggccgactgctgtatcgccatttgagcctttaaacgttttacccggtattttcgtgaataagtcccatactgaaggtcctttaccgtctttattccaggctccttcaacctgataggcagccgaggctgacccccatagaaatgtatcagggaacaggccctgttttttatgtatcatgtgtctcatcctcctgatgcgtatgatattgatatcatacgttatgaaacgcgtttcagagcaatcccgataaaaacaaaaaagcatccggcttgccggatgcttaagaatgatgatgccgcttttccaatttatgaggcggaggcttcgggacaaacccattttgtttcatcatgttaaagcgcctgtccatatgctgtttaatatgttctgctttttctttcggcaggaccccgtactcaacatatttggatatgacatgttttcgtttttcgagcacttctttttcaagtgattcaatttcttttttctgctgttccgtgagtgacatggttgaaggcatttttgttccggcggcgtgtgccggcattgtgaaaaccattgctgtaatgaaaaacgcagctaaagacaatgcagcttttttcatgactctttcctcctttaacgtttgttatatgttgctccctcatccattttttatgcaaaaaaagagcgaaattattcgctcttttcaatcgattcgtccggcagcgcgtatgtgacatacgttcccgctacaaaatcgtggattgaccgtctgtcttctctcattccgaccatgaatgcgctcacgatcacaccgattccaaacgtcacgccatatatcaggccgcccacaagcactctcaaaatcatagtgaggaagcctacctgagtgccgtcttttttgacgatgcggataccgcagatctttttgccgataacataaccgttccagtatacagggagcaaaatagcataaagagtcaaaatgatgctgatcattgtgctctcattcggatcttttcctgttgccagcataaaaataatcgccaaaggcactgaagtaattaaatagtcgagtaccacggctcccaatctgatccaaaatcccgccggtctgtaaatattcatcgtgtttctcctcgctatggctttaaaatcactttaatgttgccatcttcttttttgtcaaatatatcatatgcagcaggagcttccgcaagactcattttgtgtgtaatgatatccgtcggatcaatttcattttgttcgatcatttgatacagcatcggcatcagatgaataacgggtgcctggcccatttttaaagaaacgttgcgtgtgaaaaaatcaccgagcggaaagccgtccgcttcagaaatgtatgcgcccgtgagctgcacggttccgaacttcttaacggcttctgatgctgtaagaatcggactgatcgttccgaactgattcggtttttgctctgttttttcttttgaaagcggcgtgccgtccattccgacacaatcaatcactacatccgcgccccctgacgtttgttcatgcagcagtttcccgatctcatcatgttctgaaaaattgaaggtctctgctccgtttatgcgtctcgcatgttcaaggcggtgcgggacttgatcaactgcgataacccggttagctccttttttccacgcgaatttttgcgccattaagccgatcggacctgatcccagaatcacgactgtatctccttttttcactccgctgtgctggacgctccaaaaggcggtcggcatgacatctgacagaagcagcacctgctcatcttcaagctcactgtctgccggaaccagaaaagaagagaaatcagcataaggaacacgtaaatattcagcctgcccgccgggataattaccgttaaactccgaaaaaccgaataagccgccggcatctgtatgaggatttggattagattcatcacactggctttccatctggtgcttgcaataatgacattctccgcagccgatgttaaaaggaatcacgacccggtcgccttttttcagctttttgacttgactgcccgtttcttcaacgattcccatcggctcatgcccgacgatataacccggatcggcgggtattccgtttttatataaatgaaggtctgaaccgcatatcccggttgcggtgattcgaacgatgacatctctctcatcttgaatggcgggtgccgggacttctttcacttccatatgttcttttccttggtatgtcagtgctttcacacttggtcagctcctttttcatcactccttcccttttcacctgcttctaaacttggccggtatgttattcggcccgctgaatatcccattgaaaaggttcttcaagctgcgaccagtcggaatcgaactcagacggcgtgagcaggcactgatccaattcctttgtaatggctgcttcatctaaatctgttccgataaacaccaggttcgtatgacggtctccgaattggtcgtcccaatcttccagaatctccggttcctgctgtttgatctgctcctgctcaagtttcggcattgccgccacccaataagaaacaggctcaatcgaaaccgccggacccgcctgagacatcagcagcgcaaggctgttgcgggttgcgcaccaaacaattccttttgcgcgcacaatgctgtcaggcattgattgatgcagccagctatcaaaacgagcggtatgaaacggcagacgccgcgagtacacaaacgaagtgatgccgtactcttccgtttccggagtgtgcgcttcatgacctgccgtcagctcctttatccatcctgctgatgaactcgcttcctcaaactcaaataaaccggtattcaatatgcattcggcaggcacttctccgcggacggaccggatcagtctggcgcggggctgtaatgcgcgaaggaccgtttccagctgttcaagctctttttcgcccaccatgtcgcatttatttaaaatgagtacatcacaaaactcgatttggtcaattaataaatcggcaatcacccgttcatcctcttctcctaccgcttccttccggtcaagaaggctgtcaccggactggaaatcatgccagaagcggtttgcatccaccacggtcaccattgtgtccagcctgcagaatgttgtcagatcaatgcccatttcttcatctatataagaaaatgtctgggcaacgggaatcggttcgctgatccctgttgattcaatcacaatataatcaaatctgccgtctttcgcgagtttctcaacttcgactaataaatcttcacgcagcgtgcagcagatacagccgttggataattctacgagtttctcatccgtccttgacaagccgcctccctgcttcaccaagcccgcgtctatatttacttcgctcatgtcattgacgatgacggcaatttttaaaccgttgcggttttgtaaaatatgattcaaaacggtcgtctttccggcaccaagatagccgctcaatactgtaaccggaatttttttcataaaatagcctcctgacaaaatagaatgattacgatttataccccgcacctgccttattatcatcatgatgtacattattataaatcgtaatcgttactatttattctgatgtattctccgtttaaaatcaagtgaaaaataatcaatcataaaaaagacacgctgtcatacgtgtcttccgcccaaacttaaacatccgcaggactgttttcagtgccacagctttttctccaaaaatagcctgcggccagaacaagcacaaatgcgagcaatgtgatacatgagaaagagataaaaccgatcgcataagttcccgtcatctgcttcaatgatcctaaaatattcggaaggaaaaaaccccctatgccgccggctgctccgacgattcccgtcaccattccgatttcttttgcaaagtgctgagggacaagctgaaataccgctccgttgcccataccgagcgccatcattccgataaacagcagaacgatcaccgttgaaagcggaggcaggctgctgactcccgccatacacagagccgcgatgacaaacagtacagccagaactttcgcacctcccgcccggtctgaaatccagcctcctgcagggcgaaaaaaactgcccgctgcgacacatattgtgacgaaatcaccggcatggatttttgacaattgatattgatcaacgaaaaaaatcgccaaaaaacttgataatcccacaaaacctccgaaagtgacgccgtacagaagacagaaacaccatgtttccttctgcctgaacacgtgaaggtagtttttaagcggctgcggtgcgggctgtgcaggagagtccttcgccatgacgataaacagtataaaaacgatcatcaacggaagaagcgcaattcccattacactgtgccacccaaactgttccgcaaggcggggaccgaacaatgtcgcaaacaaagtgccgctgttgccggcacctgctatccccattgcaagcccctgcaagtgaggcggataccaccggctcgccatcggaagcgcaacagcaaaacttgcgcccgctacgcccagcagaatgccgatcgcatacagctcagtcaaagaacggccgccgaatgccccccaaagcagcgggatcatcgtgatcagcatcccgatcacggctgttttcttcggcccgatcctgtccgttaacacacctaaaatgatccgaaacacagatcctgataagatcggcagagccacgacaaaccctttttcaaaagaagataacccgaaatcctgagaaatataaacgccgagcgcccccagcattacccaaatcataaaactcacatcaaaatataagaaggaacagagcagagtgagcggatgaccgcttgtttttaattccgacagcttcataacattctcctttccggtcttctatcatttcaaattgctgaatcaagaatatatgacgggcattcaccggaaaagacatgtgtaagataatgcgacacatttaatgcgttaatcaggcaatgtgccataatttctcatagagaagcaatcttactggcagctgcaaaggaggtttggcgaatgaagaaacaacgattaattgcagcagggaacggaatggccggaatccgctgtattgaacacattttaaagatgaaccgtgacatgtttgagattgtcattttcggaagcgaacctcatcccaattacaatcgcattctcttatcctccgttttacaaggtgaggtttcgcttgatgacattacgctgaatagccgcgaatggtacgaaaaaaacggaattacgctttacacgggagaaacggttgtacacattgatacagaacggcaggttgtcacaacggatcgaaagcgcagcatgacttacgatcaaatcatccttgcaacgggctcctctccttatattctccccatacccggagcagataaagaaggtgtgtacggctttcggacaatagaagactgccaatcccttatcaatgcggccggccggtatcaaaaggcggcggtcatcggcgccggtttattaggtcttgaagcggccgtcggcttacggcagctcggcatggacgtcagcgtcattcaccactcttccgccattatgcaaaaacagcttgatccaacggcatcccgcctgctgcagaaagagctggaacgaaaaggcttagtctttcttttagagaaagacacggcatccattacagggaactcacgggcggaaggcatccgtttcaaagacggttcttccatagaagcagacctgattgtcatggccgccggtgtgaggcccaatatccgatcggctgcatctgccggactttcagtgaaccgaggaatcatcgtcaatcaattcatgcagacgaacaaaccgaatgtgtatgccgtcggtgaatgcgcggagcatgacgggattgtatacggattggcggcgccgctttatgaacagggaaaagtgctcgcgcagcatctatgcggcgtcccgtgcgaagggtttcaaggctttgcacaatctgcagccttaaaaatagccggtattgatgtatggtcggcaggaaaggtgcacgaggatgagcacacagccggcatattgttccatgatgagcatgcaggcatctacaaaaaagcgctctttgaggacgataaaccggccggctttattttattcggggacacgcgcggtaaacagcggcttctcgacagtcttgtgaagcaaagagatatttccatcgtgaaaaaacagctcatggaaccggatcaaggcggtatatcctttgaatccatgcctccccatgaaaccatttgccaatgcagctcagtgaccaagggctccattgaagaagcggtgaacaaatatggcttaaaaaccgcggaggaagtgaagcacatgacaaaagcgtccggatcttgcggaggatgcaggccgctcgttgaagacttgctgaagtatatggcaagcgatgattacacaaaaccctcccgccagccttcgttttgcggctgcaccgatttgacggaagaagaagtcatcgccgaaattcgccgccgtccgttcactgatgccgccgaggtaatgagagagatcggctggaaaacagaaaacggctgccgcatttgtattccggcgcttcactattacttggaaaggacgcggcctgattttatgcagttcaatgaaatatcggcagaagagacatgcaccctgattccgcaaatgtacggcggactgacaagtgcggcagagctcaaaaacatcgcagacgtcatcgaagcatacggcatccccgaggtttcgatgactgacagtcaccggctgaggctttccggaataaggccaaatgaccttgcaagcatcagaaaagcactgaacatgccggttttctccccccggcaccgctggacgatgcaaatcaaagcatgtacgtgcggacagcatcgctcctttcaagagctggcaagcaggattgaacgagataccgacacgcttgccgtacccgcttatgtatccgtcagcttgtcatgtgaaaacaattgcaccgatgcttacattcaggatatcggcgcgcttcagacacaaacttgctgggagatttatatcgggggcgtccgcggaaaacaagcccgcgccggcagccttttttgtgtgacggataacgaagacagtaccgccgctatgatgaaaggccttattcaatattatcgcgaaacggctcactacaacgaagcgatttatcaatgggttgacagactcggcctcgtccatatcagagaaatgctgtttgaagaagatatgcggacacagcttctgaaaaatctccgttcagacatatccctgctgcaaaacctgtctgccgggaaaacgccatacgaaaggatgaagctttttgactgaaccgatgctccgttatttccgtgacaaactgcaagatattcaatcggaaaaaacatatgagacgcaatgcccgttctgcagcatgcaatgcaaaatgcagcttacggaacaaaccttcgcggcacggaagaaatacactgcaatcggcattgataatccgacgacacatggccgtttatgtacaaaaggcatgaatgcccatcagcatgccgtgcactcttcccgcattacacgccccctgcttaaaaaaaacggtgaatttgtgcctgtctcttgggctgaagcactgaatcgcataaaggaacaaatcaatctgatccaaaccgaacacggcaatgatgcgatggccgtctacgggagcgcctcaattacaaatgaagaagcctatctgcttggaaagttcgcacgggtcggcttacagacgaaatacatcgattacaacgggcggctctgtatgtctgccgcagcaacggcggccggccagacattcggcgcggacaggggcctgacaaatccattatcggacattccgcatacacgtgtcatcatcctggcaggcaccaatatcgcggaatgccagccgacaatcatgccatattttgataaagcgaaagaaaacggggcttacattatcgccattgatccccgggaaacggcgacgaccaaaatagccgatcttcacctgaaaatcaagcccggtacagacgccgccttggcaaacggactcgtcaaaatctgcattgacgaacagcttacagacaaagactttatccgcacacgaacaaacggattcgataagctcaaacggcataccgacgctttggatctgaaagagatctccgagcagacaagtgttcctttggagcatatacgaaaggccgccgtgaagtttgccaaggaaacatccggcatgctgtttacagcgcgggggatcgaacagcagactgacggtaccgcggcagtgaaagctttcttaaatatagtgctgatcacgggaaaaatcggcaagcccttctcaggttacggggcgattaccggtcaaggcaacggacaaggcgcgagagaacacggccaaaaagcggatcagcttccgggctaccgttctatcgaaattgaagaacaccgggcgcatattacgaaggtgtgggggattcatcaggatgagctgccgcgaaaaggcgtctcagcctatgaaatgatagaaaaaatagatagcggcgacatcaaaggactgtttctcatgtgttccaatccggctgtttccggcccaaatgcgaatttcgtcaagcaggcaatcaagaaactgagattttttgtcgcagttgacttatttatttctgagaccgcggcattcgcggatgtgattttacccgcctcctcttatttggaagacgaaggcacgatgacaaatgtagaaggccgcgtgacattaagagaagcgagccgcacctgccccggagaagcgaaacatgattggcagatcatctgtgacattgcctccgctcttggtaaagggcattatttttcctatacgtcggcggaggaaatctttaacgaactgagagaagcgagccgcggcggaatcgctgattacgcaggcatcacctatgacaggctcaggcgggaaggcggcattcagtggccatgtcctgaagcggatcaccccggaaccgggcgattgtttgagcactcatttgcccatcccgatcacagagctgaattaagcgtgattccaaatgaaccggccgtcccgaaagagaaaccgagcgccggctatccgctttatttaaccacaggaagggtgatgtctcattacttaacgggtgtccaaacgagaaaaagctccgccctggctgcaagacatttcgaatcctttgtggaaatccatccaaaaacggcggccgactatcatatcgaagaccgtgttctcgtgaaagtagaatccccccggggcagcatcacggtccggagcagatggtcggagaaagtacgaaaagacacgttgtttgttcccatccattggtctgacacgcaaaacgtcaacgacttaattggtgaagccttggatccggactgtaaaatgcccggttttaagatgtgtgcggtacgaatcagccctatataatttttcataaaatttttagattttttagtattttttgttacatttcataacatgcatcttaaatatttgtttttgctgtgctacgctaaaaaaaaacaaagataaggagcggatcatctgatgggaaaaaaacagctagtccttgttggaaatggaatggccggggtaagagcgattgaagaaatactgcgtgtttcaaaagacgaattcgagattacaatattcggggccgaacctcatcccaactataaccgaatccttctgtcaaaagtgctgcaaggcgataccgacattcaagacattacgttaaacgattggaactggtacaaagaaaacaacattcagctgtataccggtgaaacagtcatcaaagtcgacacggaaaacaaaaccgtcatcaccgatgcagacagaatccagccttacgatgaactcatcctggcgacaggctctgtcccttttatccttccgattccgggcgcagacaaacaaggcgtcacggcattccgggatataaaagatacagacacgatgctcgccgcgtcaaaacaatataaaaaagcagccgtcatcggcggaggactgcttggtttggaagccgcacgcggactgctgaatctcggaatggacgtgtctgtcatccacctcgccccattcctgatggagcgccagcttgacgcagcggcgggacgcctgctgcaaaacgaattagaaaaacaaggcatgacctttttccttgaaaagcaaaccgaagaaattctcggtactgaccgtgtcgaaggcgtacgcttcaaagacggcacaagcatcgaagctgacctggtcgtcatggcggtcggcatccgcccgaatacacagcttggcacagaaagcggcattccggtaaaccgcggaatcattgtcaacgattatatgcagactgacattccgcacatttacgcggtcggtgaatgtgccgagcaccgcggaatcgcatacggtcttgtggcgccgctctatgaacaggcaaaagtgctggccaaacatatttgcggcattgaaacaaaaccgtatgaaggctccgttctctccactcaattaaaggtatcaggcgtcgaagtcttctctgccggtgactttaacgaatcagaggacaaaaaagcgattaaagtgttcgatgagcaggacggcatttataaaaaaatcgtcctgaggggcaatcaaattgtcggcgctgttttgttcggcgacagcagcgagggcggccgcctgttttctatgattcaaaaagaagccgatatctccgaaacttccaaaatatcaatcttacagcctcttgatcaggaagcaggcgcaagcatgaccgcggcgatgagcgacgatgaaatcatctgcggatgcaacggcgtttcaaaaggcgcgattattcaagccattcaggaaaaaggctgcacatctacggacgaaatcaaagcatgcaccggggcatcccgttcctgcggaggctgtaaaccgctcgtggaagacattcttcaatatacactgggctcagaatttgacgcgtccgcgcaaaaagaagcgatttgcggctgcacatcactgtcgagagatgaagtcgtagaagaaatcaaagccaaagggctgtcccatacaagagaaatcatgaacgtgctcggctggaaaacgccggagggctgctccaaatgccgtcctgccctcaactactacttaggcatgattaatccggctacatacgaggatgacagaacatcccgttttgtgaacgaacggatgcacgccaatattcaaaaagacggaacatactcagtcgttccccggatgtacggcggcgtgaccaactctcaggatctccgcaagatcgccgatgtcgtcgacaaatatgagatcccgctcgttaaaatgacaggcggccagcgaattgatctcatcggcgtcaaaaaagaagacctgccgaaagtatgggccgagcttgatatgccttcaggctacgcgtacggaaaaacactccgcacggtaaaaacgtgcgtaggcgaacaattctgccgcttcggcacgcaagactccatggcactgggcattgcgcttgagaaaaaattcgaagggctcaatacgcctcataaggtcaaaatggccgtgtccgcctgcccgcggaactgtgcggaatcaggtattaaagaccttggcgttgtcggcatcgacggaggctgggagctttatgtcggcggaaacggcggaacccatttgcgcgccggtgatttgctgatgaaagtaaaaacgaatgaagaagtcttagaatatgcgggtgcttaccttcagtactacagagaaacggcaaactatctggagcggacatccgcatggcttgagcgcgtcggtttatctcatgtccaatccgtattaaacgatccggaaaaacggcaggagctcaacgacagaatgaatgagacactctctgtccacaaagatccgtggcaatacttccttaaagataaaaaagcatctaaagatctattcgaaaatgtcgtcacgacttcataaaacagtaagggggaacggacatggttaataaagatatgacaaaggtttgcataggcaaagtaaacgaattacccgaggagttaggaaaaaccgtatatatagaagataaagagcttgccgtatttaaactttctgacgggagcgtccgcgccgtcgaaaaccgctgtccccataaagggggcgtcttggctgaaggcatcgtcagcggagaatacgtcttctgcccgatgcatgactggaaaatctccttagaagacggaaaagtccaagagccggatcatggctgtgtcaaaacatacgaaacactgatcgaaggagagaatgtatacctcctgtattgatcagaccggatcactttttcaagtggtccttcattttttaaactgctgaagggatgacgccatcatgaaaaacggaatcgtatattttgtcggtgccggaccaggagacccggggctgatcaccgtaaaaggaaaacaggctctggagaaagcggatattattttgtatgaccggctcgcaaacccaaagtttcttgagtatgcctcaccggactgccggttcatttattgcggaaagctgcccgaccgccattttatgaaacagtctgagataaatgccctgctgattgaaaaagcggcggagggctgcaccgtagtccgcttgaaaggcggagacccaagtgtgttcggcagagtcggcgaagaagcagaggcgcttcatcagcacggcatccgctacgaaatggtgcccggcatcacctcgggaatcgcagcgccgctgtatgcgggagtccccgtcacccatcgtgatttcgcttcgtccttcgcgatgatcaccgctcatgatacatcattgcacggcaggccgaatctcgactgggaagggcttgcccgaagcgttcaaacgcttgtgttttacatgggcgttaaaaatctgtcatttatatgccgtaagcttacggagtacggaaaatccccttccgttcccgtactcgtcattcaatgggggacgtgggggcggcagcggagtgttaaaggaacgcttcaggatatccatgaaaaagttcaaagccaaaacatcaccaaccctgccattatcgtcatcggtgatattgtcaattttcaaacacacagctggtttgaaagcaaaccgttcatcgggcggcatatcatggttgtcactcatggcgatgaagaacacacattgacagacaagctgcgcgaatatggcgccgatgttattgaatggccgaagcggatcgttaaaaaaatgcccgcaaacgaaaacatcctgaaacagatcagcacctttgaacaactatttttcacatcacgccttgcggtatgcgaattctttgacacactggctttcaagcagatcgacatccgccgggtgaccgcaagcctgaatgcagcgactgaggccgcaaagacggaactgacaaaacggggctttctcctatccgaatgtcaaattgattctccgcattcactcattgtaggaagccgtcaagcagcagaaaacttgtcagactcaaaatcatgcccgttttatatcacccatgaacatatcgcagatgagcggttcacttccatgatcgaacgcacgatcagcgagtctcctctgcaaatgattatctgtacgggcaaagaatccgctcagcatttgatcagcgccggaaaacaaatcggcatatcaccgaatccgtcaggaaaccgccctcccgtcatctgcatgggcgaagacgtccccgccggctgcgggtttaccgccgtgaaaaatcaggaacagttatttgcgtttatacgaaatgaaatgaaagacatgctcgttcacagctgatacgccggaatttctgacccccgggctcaatatcgggggtcagcccttttttattgtgtcaccaattttttatggtgagtcgaatacatcgccatctgttccgcctgcgggtccaaataggctttggcgctgttcacggcggtcggcccctccgtgaaaccgccggcaatcaatctgagcttgctttcataatgggcggcgtcaccggcgacaaacacgcccggaagattcgtccgcatatgtctgtcagctttaatcctgccttcttctatctcaagcccccagtccttcatcggaccgagatcaattttaaacccatggttgataatgagctcatcaagcttgatgacttcagaaagtccggactcagtttggcaaacggtgacgctctcgatccgttctccggtgccgttgaggtgctttagacgatatggcgcaagcacccgcacggaagaccgcttcattttcgccacgctgctttccaaaccgccgaactcctccctgcggtgcaagacggtaacagacgccgcaatcggttccagctcattcgcccagtcaaccgcggtatctccccctcctgaaatcacgacatgcttatctcgaaacgcatcaagcttctccaccttataatgaaggttctttcccgaataccggctcgcatccgcgctgtcaagttcattgacctcaagcgtccccatgccgacagccaaaatcaccgtgcgcgtatagtgcttttcccctttggaactttccagcacaatggttccgtcttccagccattcaaatccggtcacccgctgattcaacacgatatccggcttaaatgtcgcagcctgttccttcagctgcttaatcagctgttctccggcaatcccgggtattccgccgatatcacggatgattttttcagggaaaaacatagacactttccctccgagccgcggcaaaaactcgatcactttcgttttcagctcgcgcatcccgcaataaaaagccgcaaacaggccgatcgggcctccgcctataatcgtgacgtcatacacctcatgattttccgccatcgttctgcctcccgtttatatctatacttcaaacatttttaattgagaatcaatatcaatgaaagtataacacatattgaggagaagtgtttattcatttctctcttgcggaaaaggagtgattcagaagtgaggttctgagattgataagcgggaaggtattaaaactgaaaccagtacggcgactggtttcttttttatctctttttcatcagcatgatatcgagatacagctggcaccttgtcctgaagtcgtttaaattaattgatgtcatgtcaagaatctgtttgatacggtagttcaatgtgttttgatgaataaaaagctgttctgcggctggttttgttttgcagttattgaggagatagatttctaacgttttcagcagttcggtactgctttctctgtctttggcttttaataacgctaaatcttcgtttacatattccagtgaggcgtttttttcttcgatgctttcaagatagcggtaaatcccgagcttactgtattcgtacgggatattttcctggtttccggtaatttcggcggcctttatgacttcaagggcctctatataacttttgccgagcttcaggatgctgctgtattcattgccgattccgatatagatgggagtggggatcttctgaaagtgaaaatgagtcagcagtttgtgggtgaattcagatgctgccgaagtgccggagcttttttgcgagaagcttgcgacgacgatgacaatattggaatcaatggttaagacgtgactgactttatcccgcaaattcaagtacgatttgatattttccttcacatcttcgactgcctccccatccccattcgcggcgtgcaggacgactactgaaaaaaccgacggcagcacggcgttcatcttttccgcttcccgcctgaactccttttcagaggagaattgctgaaagatcgcccgtttcaccaggtcttccgctctctcttctttttcctgtttcagccggttcgttttatagatgatttttccgacatggaatgaagtttcatataaaaaatcgagctcctcgtccgtcaagtttcggtcgagctcctgaatccagatgtagcccatcacttcgcctttatgttttgcgcttacaaccactctctgattcagtccgatactgtctattttttcgacacggaacggttcaggaacggttttcagcttttcgatcaccccgtccttcagaaacctttcaaaaatctgcacggggcatttttttgaaaatatcgtctgctggttggcggagtcgaagtgattaatgtaataagaattataggcaagcaaaaagaaatccgcgctttccagaataacgggcttctgcaattcataactgatgaaatcaattaatttatcaatgtccgtaaatgaaaaaactctctctaaaagctcttccatacctatttctcctatgctctttttatctttatcatactctgcggggtgactttttgtatagaaaaaaattcacataatcccaaaacggcatgatccggaattctgtatcgtgaaaagaggaaaaagggcggtcccttcttcctctcgttccttgcttttattgagaaagtgtatcacggtactcatgaaactgatctgtgacatcttttgacggagcctgtgtcaataagctgacgacaaatacagcggcaaggcttacagcaaagcccggaatgatttcgtacaaaaagtctgaaagaccggcattcgcccaaatgattacggtaatcgctcccgcaatcatgccggcgagtgccccccatttcgtcatccgtttccaaaataaactgagcagtacgaccggcccgaatgaagcgccgaatcccgcccatgcatagctgacaagaccaagtatcgtgttgtttttctcccaggcgagcaccaaagcgatgattgacaccgcaagcactgccattctccccagaaatacgagttccttatcagaagctgaacgcctgaacatggacttatacaagtcctccactaaagaactggacgtaacgagcagctgagacgaaatcgtactcataatggccgctaaaatcgcagaaatgagaaatcccgtaataatcgggtggaacagaatgttgccgagctgaataaaaatggtttccggatcagccagcttcagtccgttctggtggtaatacgcgattcccgcaagacccgtaaacagcgcgcctagtgcagacaaaatcatccatcccattccgatccgtctggcacgtttgatttctttcacagacgtgatcgccataaagcgcacaataatatgcggctgcccgaaatagccgagcccccacgcaaataaagaaataatgccaaggacggtcgtccctttgaacatgttaaacagttccgggttgacggaacggatatcggcaacggtttcccccgggccgcccgtatggaaaatcgtcacaatcggcacaagaataagcgccacaaacataatgatcccttgaacaaagtccgtccagcttaccgccaaaaagcccccgaacaaggtgtaggcgacaacgacgcctgtcacgacccacagtcccgtgtggtaattcaaccctaaaatgctgttgaataagacacctccggataccatgccggatgatacgtaaaatgtgaaaaagacgagaatgacaagacccgaaaacagtctgagaagcttcgtatgatcaccgaaacggttttcaaggaaacccggaatggtgatggaattccccgctttttcggtatacgttctcagtctcggcgccacgaaaagccagttcgcccacgccccgagcacaagcccgagcacaatccaagcgccgcttaatcctgtcgagaacatagcacccggaagccccatcaagagccatccgctcatatccgccgctcccgcgctgagcgctgtgacggcagggcctaaagaacgccccccgagcatgtaatccgtcagatttgacgtccgtctgtaggcgaaataaccgataaacagcatacccgccatataaatacaaatggaaataatcaactgaatgtttgctatggcatttcctcctccgctttatatgtttatggtgaaatggacaccccccgcgaggaggatgcccattcagtccctcttaaaacatttcactgattgttttcgcctgcatgtggagggccaaataatccgggccgcccgcttttgaatcagtgccggacattttgaagcctccgaacggatggtagccgacaatcgctcccgtacaattgcggttgaagtacaggttgccgacatggaattcctgtttcgcccgttcaatatgtttgcggttatttgtaatgaccgcgcctgtcaaaccatattcagtattgttggccacttctaaagcttcatcaaagtttgacactttagaaaacgccacgacaggcccgaaaatttcttcctgcatgagtcttgctttcggatcaagatcagcgaagatcgtcggcttgataaagtagccttttgaatcatctccggtgccgccgcttactaaacggccttcttcttttccgatttcaatgtagctcatgatcttgtcgtaagaaccttggtcgatgacaggccccatataaacatctgcactgtcaggtttagcagttacttttgattccgtaatttcaatgacacgctctaatacttgatcatacactttttcatggacaactgcacgtgaacctgcagaacatttttgtcccgcgaagccgaatgctgatgtaaagatggattgagccgccaattcaatgtccgcatcttcgtcaacgacaaccgtatctttaccgcccatttctgcaatgacgcgtttcagatgctgttggcccggctgcactttcgccgcgcgttcgaaaattctcgtaccgacttcacgtgatcctgtaaatgtgataaggcttgttttcggatggtcaacaagataatcgcctacttctgctccgcttcccggcacaaagttgactacgccttttggcaatccggactcttcaagcacctcaacaaattttgctgcaataacaggtgtagcactcgcaggttttagaaccactgtgtttccagtaacgatcggcgccactgttgttcctgccatgatcgcaaacaagaagttccacggcggaataacaactgtcactccagtcggcgtgtacacatattggtttttctcgccctcacggctgttgaccggtttgccttttgccagttcgatcatttggcgtgcataatactccatgaagtcaatcgcttcagccgtatctgcatcagcttcgttccaaggttttcccgcttccttgacgagcagggcggagaattcgtgctttctgcggcggactttggcagctgcgcggaacaaaacggccgctctttcttcaggggatgtgtatctccactcttcgaacgctttcgcagcagcttcaatcgcttgctcagcgtgctcctgggacgcctttgacacttttccgacgacttcttctttatcagccggattgattgaaacgattttcgcttccgtctctaccttttcaccgttgatgacgagcggataatcttttcccagatactcatttaccgtcgcaagcgctttcttaaattcttcaacgttcgattgatcttggaaattcgtgaatggttcgtgtttataaggtgtagtcattgtcatctctcccttttttacttcttagtcatccctttaaaggcgaatgcgatgtttgaggggcgttcggcgagccgtctcatgaaatagccgtaccagtcatccccgtaaggcaggtagactctcatgcggtatccttcttccaccaggctgagctgggtttgcgagcgcatgccgtacagcatctgaaactcaaaacggtcgtttggaatgccgtgctctttggcaagctgttttgtaaactcgatcattttgtcatcatgcgtggcaactgccgtataatgtccttttaaaagctgtttgcggatgagtcttttataattttcatcgacgtcgcttttttcaggataggccaccttttccgattctttataggcccctttgacaagccgcagaaacggattcagcgggctgaggtcgtcaagatccttctccgttctgtacagataggcctgcaccacggtgcttacatattcataccggctccggaagtctttaaagatatccagcgttttctggcatctcgtttcatcttccatgtcaatcgtcaccatgactttatgtttttcagccgtctggaggattttcgtcatattttcatagacgagatcgagatctatatcaagacctaaagacgtcatttttaatgacacttgggaattcagctgttcatcagcgattaaggcgatggtctgcatgcactcctcggtgcgttctttcgcgacatcaccgctgttgacaaattcccccaaatgatcgacagtaactgacagcccctggctgttcaaatgtcggattgtcgggatagaactgcggaaatccattcctccgatgattttgccggctgccacacggcttccccagcttcgcgccatcttattgagaaagctgctcttggataaaaataagaaaaaatctcttgtaatcacttccaaccttaacaccccgcaatctaagaagtatttgtatgagtctattgtaaatggacaaaacatcctctcacaatattctaaaaatacaaagattctgataaatttttgtggttttaccacaatcagcttcttagatagcaggcggattatgccgaaaaaaggcggacggaaatgacggcaatcgtcaatttccgcctttttccccccacgcctcttcgacggtctgaatcaatagccgattcagttcctccgttatgtcaggtttcggcgttttgatcgttttgacatagtgcccgatgcgttctatttcttcttctataaatgcatgaatgatcgtatttctgggttccggagccagctcctgaccgctttttttccttgtaagcagtgtattgatttcagaaatgagcgcttcatccgtcaataaggcatcggccagtacgggaaatgacatcggcggtacggagccgaacgtttcaatccatctgcaggcaaggagaggacgcagaacataaaaatactttttaatctttacttcactgccccgcaattccgttttttcattccgttttgccatattgagataatgatagatgccggcttcaggcgaaaaggcgcggattttcagttttcgaagcttttcagccgctgagaaagcttcataatagatcatctcagaagagagccattccaaaagaggcggatttgattttttaaaaagcctaagcgcttttctcagttcccagccgctgatgtcaagcatgtcatgaatcggctcttctatgacatccctatgcggttcgatcgaaaagtaccattcttttttcggcacatagagaaaccgcacatcgtagtcgctgtcgcttgacggaaacccccatgcgcggctccctgattctacggcgtaaagcaccttgacgccgtgctgtgcttcaattcgttttaattcttcgatgatcctttgtttcatctgtatccgtccttttccgtgatcattcctgaaaaaagcccaagtacttgggcttttcgctgtcgtcagcctttcagatgcgctttcagaaaggccagcttttccgtatggaaagaaggtatgtattcatgtccgaaataccggtaaaccttcaattctttttccgtttccagatgattgtacgcggcaaataccgtcgacggcggggtcacacggtcaatcagcccgatggacatgagcaccggaacttttacgcggtccgccagattcatgatatcaaaataggccagtgtattcatcgcggccttctccgtttcagggctgccgttctttctgaaaaaggagttaatctcaagatacggctcatcaagagcgacatcaatggcccgctcaaaattgcttaaataaggataatcggccgcaaccgctctcggaatgtcagatagtgccgccgcggcgattgaaagtccgcctccctggctcccgccgatgacggcgatcctcgtttcatcaacttcatcaaagccgctgatgacttccaaagcccggacggcgtctaagtacacgccgcggtaataatatgtatctttatctaaaatccctttcgtcatccagccgggaacgtgtccgtgcggtgagacgcttgtatctgtgctgctgtgctggccgcggacaagcatgccgaacgcggcatatccgtgaagcgcccaatttacgatgtcatgtatatccccgtcatagctcgcattatagccgtgatatttcacgatggccggatgcggtccttgccggtcgggaatggcgtaccatccctcaatttccgccttgccgaagcttcggtatgtcagccggaatactttcacgccgtcagccgggtagctttcagccgtcaattcaggctttgcctcttcctttgcaagctcatgtaatgatgatgcccaaaaatccgaaaagtcatgaggagcggttttatttggtttataggtttgcagttggtcgagcggcaagtcgtataattgcatatccgattattctcctttgttttataagatttaattttctgactctatcttaacacgattttacactcattttctaaacattttaataaacgtttgtttaaaaacaaaaaagccgtgcgctcacagcgtcacggctctttttacatcggctgatacaggtcccagccgatttttaacgtttctacgatataatcggcgatttcttctggttccagattatccgtcgccacttttgaattatgtttatcatagatgctttggcgctcgttaaagagctgctgcatttcatccatggaacggttatgcagaacgggacggctttcaatcagcagatcagcccgctgcttccaattctcccatgataaatcaagatggagcacgagacagttttcaagacagcactgtctgatttcctcttgtttaaacgaaccgcccccaagcgacacgatcttgaatttcgtattacggcaaatatctaatatataatccttttcggtctgacggaaaaaggcttcacccttctgctcaaacatttcagggatggacatattgaaatctttctcaatctgcaaatcaatatcaataaagtctctgtatagtttcttagcgaccagctggccgattgttgtctttccgacacccatgaatccgatcagtacgatatttctttctcttacgggaatggcacgttttgcgttcatcttcggcgaaatcctcctaagaaatgaaaaagttatgtttattatatgataactcaatattgaaatatagagataatgcaatgaaagaaaacccatcctttataagaagagatgagtttttctttctatcggagcttaatgcgttccacctttccgacaatgaaaatataagaaaatgccccgataaatgcgacagcgccgacaaacagaatcgctccgttataagaaccggtcgcagaaacgataaacccgatgataagcggggtgataataccggccatattggcgaaaaagctaaagacgccccctgccaatccgattgtttcgcttggcgcgacctcactcagcatcgtccaggatatgttggacatgccctgcgcaaaagaagcaatggataagatcgtcaaaaccgcgggagcagaatccgtaacattcgcaagcacgatggagcctgtcagcagaagaccgaggatgacgggcgttttccgggcaacgttcaccgacaccccccgtttcatcatgccgtcagaccaatacccgccgaacaatacgccgaaaaaggcggcgatatacggaattgatgcggcgaagccgacttttaagaaagccatgtgctttgcctccgccagataagtcggaaaccatgtcaaaaagaagaacagcgtggaggctacggcgaattggccgatatacaatccgacaagcttgcggtattttagaagctggacgaaatccgcccacgatatcctgccggctgaatcagacacctcagtcagtccgccgccttctttaatataatcaagctcctcacgattcactttccgatacccgttcggctcgtgatacattttaaaccagaaaatggagaaaacaattccgagcacccctgaggaaataaatacggcgcgccagtcaaatgccgttaacacccagaataaaaccggtgtggcgaacgccagcccgacatattcccccgccgtataaacacccgtcgcaaaggcgcgttcccgccttggaaaccatgtcgtgacaatccggttgtttgccggaaacgccggcgattcagctatgccgatgagcaggcggcagccgaatagaaacccgaaacttgtcgcaaaagcttgtactccggtaaaaaccgaccacacaaataaagaaattccgtatgtccgttttgacccgaatttatccaaaatgagcccgcctggaatctgcatccccgtataggtccagctaaacgcagaaaaaacgatgcccaaaagcgcggggcttatgttcagcgaatgttgaatggatgggccgacaatagatacactggctcggtctatataattaatcgcagtgataaaaaacaaaagaaccaatatcacataacgagcgcgagtcggtttattgcggacgggactgaaggccctcagctccgtttcttttttcaatggcttctccccccttactcgaatgaaattaattgtacaacacttcggttaattatttaatactttgacgcaaaaaagcgttaaacaatttgtgtgccgcactgacctgatgtagacacaccccgcttataaaaagtgtctgcccttttcacctgtttatccgtatcgcacccggggaaaaagtacacatatgataggcagttacgggaggattaccgatgaaactgagtttttgcacgacaggatttaagaaaaagcatatttttgacatcatttctttcgcgaaggagcactcctttgagggaatcgaactgtggtacggacacgctaaacaatatatagaggaaatcggcccgctcgacaggctttatcagcagcttcaggaggaaggcatcggggtgcctaccgtcagtttgtacactgacttcgccactcaggatgaaaggcaggcgttaaaggatgttcaaagggcattaagcgcggcacgacagctgcacagtcccttgatcagggtctttgccggcaatcttccttcgcaccggacgtcaccggaaaagtggcaacgtgcggttgatcaatttcagcaggcggcacggctcgcagatgactatgaagtcgatatcgggcttgagattcattacgatacgtacgcggatacaccggaggcggcgctggcatttttggaggatgtcggacatccgcgggtccgcaccatttttgacggctccaacctacacgtcaatcacgttgaccaaatgtccgctttggaaaaactgtatcataccgtcagccacattcatctgaaaaactatcactgggattttgacaactggtatctcagcaagccggtatccgttctgcaaggggatttaaggcaggaaccctttctgaaagaactgatgaacaggcaatacggcggattcgtatcactcgaatacttcggtcatcatgctgaagagcatatcaaagaatcactgaatgagatcaggcactgctttaagaaataaaaaacatcccctctgaagggatgttttttcaaattaagaaaaaaattttagaaatacagaagggattttatggataatcatctaattattaacactgtaacacatttcatttgaaaagggagtgctcgaaatgaaattcaaaaaagtgttaaccggttctgcgctgtctcttgccttactgatgtctgccgctcctgcctttgccgcatcaccaacagcatccgcatccgcggaaaatagcccaatctcaacgaaagcagatgccggcattaatgccatcaaactcgttcaaagccctaacggcaatttcgctgcttctttcgttttagatggaacaaaatggattttcaaaagcaaatactatgacagcagcaaagggtattgggtagggatttatgaaagtgtagataaataaaaatgaaataaacaaaaaacctccctttcaaaagggaggtttttttcattctatttccaccaatcatcaaacatcgatgccggcacctggcgcttatgctccgtactgagatagcgtttttccagcgcctcaatcacttcggaagaaacgtccttgccttctaaataatcatcaatgtcattgtatgtgatgccgagttcggtctcatcagtctgctgcggtttttcatcgagcagatcggccgtcggtaatttcaaatacaggcgttccggcgcgccgagctcttctaataaacgtctgccctggcgtttcgttaatccggtcagcggcagcagatcagctccgccgtcaccgtatttcgtgaagaaaccggtcaccgcctcggccgcatggtcggttccgatgacaagcagcccctcttgtccgccgatggcatattgagcgatcattctcattctggcctttacatttcctttgttaaagtcagacagctgatcgcccgtgtctttcttatactgatcagcgaacgcgctgacagcggacttaatatcaaatgtccatgatttatcaggtttaatgaatttgagcgccaattgggcgtcatcctcatcttgctgtgtgccgtgcggaaggcggacggcgataaattcagcgtttccgccttcttctctgatgctttcagccgccaattgggcgaggcgtcccgcaagcgtggaatcctgccccccgctgatgccgagcacaaagcctttggcacctgtttttttcaaatattgtttcagaaagttcactctgtcctcaatttcttgtttcggatcaattgagggctttacatggagatcattcataatttgtttctggatgctcatcccaatcactcctcctgcattgtttctttatgatccatttcccgttcatgctgaaaatgaatcatgccactatgtacgactctctgttaaatatagcacaggtgcagattttaagtgaatcaaatacaccgggatcagctgatttccacccgcagcgccgtgatgctgtctccgttgcattttcctttttcaatcggacaggatgaaaacgcgacgacgagatccatttccgcacggagccgtacataatcacccgcgtcagaaagaggcgtttcgactgataagttccccttctcatcgagcaccgtgttcataaagatggcaaatgggtaatgcatatgcggccgcggcaccccgaacggttcaagcgccccgctcatattgtcatagcacgtatcctggagctcgtctttatgctttccgtataaaagcctgttcatatccggacggcaggcgggaagcagcaggtcatgcttgccgactgtatcctcaatcagcgtcagcatcggcttgtataaattcgaataaatatgatcacccgtttttacatgaatggactggttggcatcaatcgtcgcgccctgatcaagatgttcatagaagtccttggcatgatacgccgtgaagtcagccacctgctgtccttccacatcgactacttttataatctgccctttgtgaaccttcaggccgagcccttttttcggcggtacaataaattgctgtgtcatcagactgctcctttttttcttctattatgaacttcggccgtttgtttcatgtaaagcaatttattggatgtatattccccttctgacggccgcaatctaagctttgataaaggggttgaacttcatgggtaaatcacaggaccagcctaaaggaaatctcgcttggtggcagctctccttaatcggcgtcggctgcacaatcgggacgggcttttttctcgggtccagcatcgctattgtcaaaagcggatattccgcgctgatctcatttcttattgccgggcttggcacctattttgtctttgagcagctcgcgaagctttcggccaaacagcccgaaaaggggtctttttgcgcttatgcgagaaaggctttcggcacttgggccggtttcagcaacggatgggtgtactggtcgtccgagatgctgatcacgggaagccagctgacagcgatctcgctgtttacgaagcattggtttccgaatgtgccgctgtggattttcgcctccatctatgcggtgctcggtcttttgattatatttacggggctgtccgtttttcaaaaaacggaaaatgtgctcgctgttgtcaagacagcggcgatttttatgtttatcgtgatcgccatattggcgctgtgcggtatattttctcataaaccggatgtgcaggtgccgaacgaatctaaggatttgttcccgcacggagcgatggggttatggacgggactgatttatgcgttttacgccttcggaggaattgaagtcttggggctgatgaccgtgcatttaaaaaagccggaggaagcctcaaaatcaggccggctgatgcttgccgttcttgcggtgatttacgtcatttctctcggcctggcgctgctgttagtgccgctgggcaaattcaccgaacaggacagcccgtttattacatcgctgaagggttttcatttagatatcattcttgatatttttaacgggatttttattattgcgggattttccacgctcgtcgcctcgctgtttgccgtgacgacattgctttgtacgatggccgatgacggggatgcgccgaaatgcttcagattaaaggaaaacaaaaaaatctgctggcctgcgctaggattgacgtttgccggactcatcgtctccatcatcctgtcattggtgctgccgaaaaatatatatgaacacatgacaaccgcggcgggcctgatgcttctttatacgtggctgttcattttgttctcgggcaagaaactgcttgaaacgacaaagatgggaaccgttcagattgttatcgcccttgtgctgattgtcgcggccgtctccgggacgctgtttgagaaatcgagccggcccggttttctggtcagcctttgttttctcgccgtcattgcgatcgtgacatggatcgtacaaaaaaagcagggacacagccctgccggatcatagcttatttcgtcggtttaaacagtctcttcaaataagaaaagggacactttgacacttgcgtctcatcatcacggaggaaatattgcttccattctaaattgtcttttcctccgtaccaccccaatcggggatgaagaggggcttcatcatacgcctctaagcgttttctgatcagccggctcatgtttcgtccgaacgcggttgaatcatttaatccttcgaaaacccatctcggctgaaacgccagcataaaaaacgggaagcttctgctttgtctcgcttcatgcgcaggcgtcgcgcatagaataaaatacggctcgccgtcaaagcagaactcccatttataatgttcagggtcctccggtatgtcttccggccagtctttcgggtcgcagccgctcagccggtttaaaaaagaccagaacagttcttcatacgcctcaacggaataatgctcagctaaatcctcaggcgtatcaaaaatcacaagcagcgacgcgtattttccggtattccttgagatctttccgtactcggacagcagcatccccacttcctccggggttccctcttcgcggggatcacccgcaaaggatatccggagctgatctgtcaaaaatccctgacgtcccggaatgcacggaaacgcgtccgctttatcacctactttttctgatagaagctcaaaagcgactctctgccaatttggcagatccaacaacttttcctcaaggcaactttttgtgtacagctcgcttgccatcagcccacctccagtatcgtcaggatacgttatgatggagacaggcgatgggtgacagtccttctatttatgagatgagcatttgaatcccctgccagccgaaataaaatccgaaaacgatcaaagacacacccgccgctcccgtcagccagcggagcgctttttcatgaaggagatttctgaaagtgctcgcggcgaccgccatgcagaaatcccagatcaaaatgccgagaagaatgccggagctgtaaatcaaaagctgatttgtatcgaaggattcagcggttttagcgaggatgctgccgtatatgccgagccagaataaaatgctcagcggattggaaagagaaataaaaaatcccgcgccgaatgttttgtaaaaagccggttttccttttccgcttctgacattcatggcttcccttatattttttagcgtttcgactcccgtataggtcagcacgaaaaaaccgaagagccacaaaaacgtttttacaaaaggagcggtcaaaaattgagacagcccgaaatagatcagaatcatatacagcccgtccgcggccatggcgccaagaccgaaaatccatgcatgccaaaagccgtttttgatgcctttgtcaatttgcgccgcattgaccggtccgacaggtgctgacaatgacagcccgagaacgatgtagcttaaaaagatgttcattggcttccccctcattcatgcaacttgtacaagttattcatgaatgggccgtgctatgatatattattttaatttctcaagctcgtcttccatcatgtccgtcgcttttcctaaaaaatcgaatatcagccgcagttcttcttctttatattgccggcaaaggctgatcgtagactgggataaggagctgaacaattgcttcacattcgcttttccggctgtcagcggcacgataatcacccgacgtttgtcttcggggtcttttttcctcatgacatatcccgctttttcgagccggtcaatgagcgccgttaccgaacctgtgctgagaccggtttttttcccaagctcgcctgcggtcatcgggcctgcttcatttaagatatcagctgattttaaatcggtcggaaacagaccgagagattgagcggccgcctgatgaaaaaggatcgtccttgtggccatctttcggaataactgtatcgcggtttcctccgtctcgcttctggtatttcttgttgacaactgacaggcctccctataaaatcaatttatcttgacgatcaagataattttcggcaaatctaatatgatcatagcaaatttaatgatcaaaagtaagtatgggaggaaaaagcatggaacaaacagccgcgaaggacgcctcgacgaagtttgtcgtcatcggtcttttgctgggcattttaatgtcggctatggataatacaatcgttgccactgcgatgggaaatatcgtggcggacctcggaagtttcgataagttcgcgtgggtgacagcatcatacatggtagccgttatggccggtatgccgatttacggaaaactgtccgatatgtacggacgcaaacgtttctttttattcggtcttattcttttcttaatcggatccgcgttatgcggaatcgcccaaacaatggatcagctcattatttaccgcgtcattcagggaatcggcggaggcgcgctgatgccgatcgccttcacgatcatttttgatttatttccgccggaaaaacgcggaaaaatgtcgggcatgttcggtgcggttttcggcctgtccagcgttctcgggccgcttttaggcgcgctcattaccgactccatcagctggcactgggtgttctacatcaacgtgccgatcggtattttatcattgtttttcattcttcgttattataaagaatcccttgaacacaagaagcagaaaatcgactgggccggcgcgattacgctggtggtttccattgtcggtctgatgttcgctcttgagctcggcggaaaaacgtatgattggaactccgtgcagatcatcggtctgttcgctgtgttcgccgtgttctttatcgccttttttattgtggaaagaaaagcggaagaaccgattatctcattttggatgtttaaaaaccgtttatttgctacggcacagattctggcgttcctttacggagccacgttcgtcattttagcggtgtttatcccgatcttcgttcaggctgtgtacggaagcaccgcgacaagcgcgggctttattttgacgccgatgatgatcggctctgttatcggaagtatgatcggcggaattttccagacaaaagtgcggttccgcactttaatgctgatttccgtggtcgctttctttatcggaatgctgctgctttccaatatgacaccggatacggcgcgtacgatgctgacggtattcatgctgatctcaggattcggcgtcggcttcaacttctcactgctgccggctgcgtccatgaacgatctggagccgcgttaccgcggaagcgccaactcaacaaactcgtttttgagatcattcggtatgacgctcggtgtgacgattttcggaaccatccagacgaatgtgtttaccaacaacctcacagattcattcagcggcatgaaaggagcgggcggtgcgatgcagaacatcggaaatccgcaggagattttccaggccggcacgcgcgcccatattccgccgcacattctggatcgcattattgacgccatgtcgcaaagcatcacatatgtatttacgcttgcgctggcgccgatcgtcattgcggccgttaccattttgtttatgggaaaagcgagagtaaaaacctctcaggaaatggcgaaaaaagcgaattaaaaaaagcagtacatggcgtttgtcatgtactgcttttttgtttactctgcgaaatgcggagcgagaatatctttcagcacgtttgcgctgcggctgaattgagcctgttctgtttcattcagctcaagttccgtcacacctgcgatgccgttccgattgacgacggccggaacgccgataaagacgtcgtttacaccgtattggccgtccagatatgtgctgacggttaaaatgctgttttcattacgcaaaatcgcttttgtgatgcgggcgaggctcatcgccactccgtaatatgtcgcgccttttttctcgataatatggtaggccgcgtttttcacatcgtcaacgatctgatccagctcgtcctgtttgtaagctgcatttttctccagcaattgctgcaccggcactccgccaatattggcgtgactccatacaggaagctcggtatcgccgtgctcgccgataatgtgggcgtgtacgttttgcggagcggctccgaagtattcgctcagcatataacggaatcgcgcagaatccagtgtcgtgccgcttccgatgacgcgttctttcggcagcccgctgaatgtccatgtcgcataagtgagaatgtcgaccgggtttgtggcaacgaggaagatgccgtcaaatccgcttgccattacttcaccgacaatgcttttaaaaatggcgagatttttttcgaccagctcaagtctcgtttcgcccggtttttgattggctccggcacagatgcacacgatatcggcatccttgcaatcctcatatgtgccgtaagatgttttgaccggatgaggcgcaaatgcctttccgtgatttaaatccatgacatctcccatggctttttctctatttacatcaatgatcacaagctcatctgtgatcccttggttaattaacgcaaatgcataactgcttccaacaaaacctgctccgattaatgctactttgttcactcgttcgttcatcatatatgctcatcctccagtgtttcgtggtgtctgtttttatcttgtgaagtatttcacatttatattgtgcaatacttcacaaacttttgcaagagaaaagtttgatttttggacaaaaaaatatcggtgatggtttccggattgttgacaacatcctaaaacggaaccgttttaggatgctgtcatcttttcagcgtgattgaaaacgcgctgtccttttcctaaccgaagtaagggtttgatgtgatgatggccctatccattaatgcggaagataaccgtttaaaccggagttgttatacaaaccattctgcacataatcaaagccgggctggttctgtccgggcacttgggcgctgccattgttaaaaatcactttggcattggccgtatccgcattcgcaggcagcgtcagcgtgtaaattccatttgcattcttagtcattgctttcccgggccacgatccggttaattctatggccctgcctccatcatgtttgtaaatatatacatttacctggccccaatgatccggattttgatagccaatgatgttggtttgggccgggtcttttttgacaaacgtgtattcttgggttctcgctgcaccctcgacgttcgttccggttaacttgatgttgtatgtcgtgccgattggatctcctttcccgatcgttaatcggtccccatccttaaatgctgtctgctgcccattattgatttggtaaacggcttttgttgttttcgcatttgcacgcagggtgaccgtcagctgatcattgaaagaatggactgcccccgtttggtaattctcaagaaagacatgaggcgcattcccaatatcatcaggataaagaacagccgccgatctggcattgatcgtacctgtcagtttgccgttcgctacttgaaatgaaccggcgccggccctattatcatacctgccgtcaggtaatttcgttgaagtattgatggtgacagaagacgatcctgcatttgccagcacaacgccttttgagccgcgctgattcataaagatttggttgttcccattcggattcgagagttcctcaggctgcccggccattacattgtgaaattgattgaccgcagtgatcgcctgatctttaaataaggcgctcccgcgatctcctatttgactttttccgggaaatcttacaccatttcctccgccctcaggtctggaaaagaaaagaggcgtgcttcctgagcgggaaccaatcactgcccagcctaaacgaatatcgtcatcactcatccatgtggactcttcatcatcattggcatacgtatcatgtgattccacccatgtgactaacttgtccgcagacacgtcagatgcataatgggagatattcgacacactcagattacggttctttaaagcggatctgatggaatgcccgtagttagaagccgtcacattcatataattcgcataagcagtatctctggacgcgctgtcttgcaggatttctccgtattggaactctgccgatatatttgtgatattcggccaaaattggctgccgtaattcccatcatccggaagctctatatgcttggcggcatcatagcggaatccgtctgctccgtcattcaatgctctttccaagaaacgtttcagatagacctgcacctcagtattctgtgtattccaatcatacagcccaagcaatgaattttgagtgacgtcccatcgatccgaccaatttttaatttgtgtgtttccatgggtccagtttgaaatacgcttaatctcgtcagaaatcgcggcataatcgctggtggtatgattgataaccgcatcaacaatgacttttacgccatatttttccgcggctgcacacatgtccttaaattcttgttcagtgcctaagtaacggttgccgatttggtacgatgtcggctgatacagccagtaccagttcctcatgcttttatctccttggttcccttcctttacttggttaatcggagacgtctgaatggctgcatagcccgcatcacgaatctctttcatattttgtgttaacgtattgaacgaccaattccatgcgtgaaggatggtcccgtttttgaccgatgacgcggccacctcattcgatttgtttgcagtttcagcgtttgcagccgccgggcctgacaaaaccaaatgaaacagcaataaaaatccggcgaataacggcagtaaagaggttttgaatcgtttttcaaacatttttgacactccttatttgatttttgaagactgactgcggagtcaaaaattcctcttactctttcttcagctcctttcaactgttgtgaagactggagaattttgttaacgcttacatttcaacttatcacactctctctatcaaagcaacgtgacagagtgaattcaaatctatattcctatcaattaaaaagacttcccgctttcaaacaaaaaaagaaaccacctgtcaagatgatttcttttttatttcttttatcgctcttctgtaagacagcttcacaatgacataccgaagcagaaacagaatgcctccgcagacgataaaaagaaagatcattttcagccaagcaaagaatgtatggggaacccccctgtcgtacatcgtaatcgccgctgccgcaaaagtgaccgcaattgaatctatccgctgctgcttcacccgcttttgcagttcttctttcgtgtctattctcggcatgagcattcccgacgctcccgccctgatgcaataataaacaattataatgaagaaaaccgccaagcttccggcccattccctaaacggacagttcagaacaagtccgcgtacgatgatgtcaagcaaagacagtgtgcccacaagcattccgacttctgaccaaatcattcgttctttctctttcacactctcactctttccattcacgtttgaaagtccgttccgacgctgattcatgacttcctcccgtactattaagaatggcttacaactcccattatatcttgccgattcataatgataaaccgaaatatcattgacaaaatgtttaataaggaccccaattgatcaggacgcctatgcagataaacacgaggccgatgacaaaccaaatcagcgccagcggaatcatgaagcgaagccactttacgtacggaatgccgctggcagccagtacggccatcagcacgccggaagtcggattgacacagtttacgacgccttctccgagcatgaccgcttcaaccgcgacctgtctcgtgatgcccatcagatcggcaagcggcgccaagatcggaataaatacgaccgcctcccctgagcccgatgaaatcagaaaatgaagcagggcgctggaaatatacattccgattgcgcctgccatcgggctgaaaccgtgcagcagtgacgctagtccattgactaccgtatcaagcagctttccatgttccaggataacggaaatgcttctcgccattccgacgatcagcgcaccgtaaacgagcccctgacagcctgtaataaacgtttttgcgacatcatttgccgccattcccgcaatcaggcctgacacgattgagataaaaatgaacacggcggccatctctgaatcagaccagccaagagtaagcgcgccgtataaaaagccggcaagcgacaaagccgcaacagccagaatcaatttatggcggacggtaaacgggacatgcttgtcctccggctcagaaacctgcgggagtgaacctgccgccggaaaccaatcgttccccagcagactggcgtcctttgcttttctgagttttctcgtataccgataaatatataaaatagatgataacagaaaacaaatgtagacggcaatccgcaggccgataccggaaaacagcggcagctccgcgatgctttgtgataacccgagcggtgaaggtgataaaatcgtcgcgttaaacccggcatagcagccgatataaataacggccgctccggccacggcgtcccatttcagcgagcgggcgacgatcaggccgatcggaataaaaccgatcacggaattaacgacgatgccggttgtgccgaggatcgaaaatagagatccgacaatcgcaataaacagcagctgttttgtgcggaacgtactgatgacattactgatcaatccattgatggcgcccgttttctccaaaatcgcaatggtgccgcccgtaaacaggattaaaaaaataatcggcgcggaacttgtcatcccttcctgaatcgcggtaaaaaaagcgatcgggctgacaggagactggtctaaagaatgatagcttcccgggacggcggacgacacactgccctttgtcaccctgtcaaattcccccgcgggaacgatgtacgacgctatcgcgcatagtaaagcgacaatgaacagcagcacataagcatcaggcatcacaaacaatttcttctttttcaatacaggttcggccttcggcacagccataacatcaccatcccgctttaaatttataaactattcagaaaatacagatatgtgctatattatatacagaccgattgcctgttttcaatatcaaaaataaaaaacagacagcttttgaaggaggacttacggcatgaacagactcacagcgcatgaaaagcaagtcattatggatatttttgaccacctgcacgccaatcccgaagtaagctggaaagaatatcaaacaactgaatatctgactgaaaaactgaaagaggccggctgccgaacccgcacgtttgatgattgtaccggtgttgtcggcgaaatcggagaaggctcgcccgttgtggctgtccgggcggatattgacgcgctgtggcaggaagtggacggtgtctttcaggcgaaccattcatgcggacatgattcacatatgacgatggcgctcggcacgatgatgcttttaaagagtcagccgaaacttccgaagggcaccatccgctttatttttcagccggctgaagaaaaaggcggcggagcgctgaaaatgattgaaaaaggcgtactggatgatgttgacttcttatacggcgtgcacgtgcgccccgtacaggaaacggcaaacggccgatgcgcaccgtccattctgcatggctcaagccagcatatagaaggcctgattatcggagaagaagcccacggcgcgagaccgcatctcgggcttaacagtatcgaaatctccgctcttctcgtccaaaaactcagcttcattcatcttgatcccggcatcccgcattccgtgaagatgacaaagcttcaggcaggcggtgagagttccaatatcattccgggaaaagcatcgttcagccttgacctccgcgcacaaacaaatgccgccatggagaaattaaccgccgaaaccgaaagagcctgtgaggcggcgactgccgcattcggcgcaaaaattgaattacaaaaagaacacagcctcccggcagccgagcgaaacaaagaggcggaagccatcatggcatctgcgatcagcggcattctcggagaagaacatgtggatgaacctcttgtgacaaccggaggagaggattttcacttttacgggttaaaggtgccgaacttgaaaacgacgatgctaggcctaggatgcggtctggagccgggacttcaccatccccaaatgacatttgaccgaagcgccatctttactggcgttgagatattaacggccgccgtcctcaaatcgtttgaagcataagaaaagcagcccgttacagggctgcttttcttcgttatttcttcaaatcttcaattgaattgacgtttttcatatactgaggaacgaccagacccatcttgacgcctgtcagactcgttcctacatcttcatatttgcctttatatttagacgcatatgccttatgggtattcggaagccaagcagacaatgacgcatccgcgctgcctgtcgcaatcgcagtccacatcggtcctgcctccacttgcgtcagcttcacgtcatagccgaggtcttgaaatacttttccgattacattcgtacttgcgatttcactgtcccatgccacataagccaggttaattttatcccctttaactttatgggcgccttttgtccattgagccacttggtctttgtgttttttcacatattcagcagcggctttggccggcttttcgccttcttcaacggcaatcatgacttctcccatatcgtcctgcgtccatttgaactggctgagaactttggccgcgttaggctgttccttactgaagccggttcttgtaattgtatgaatctgctcggcagttccgtacgtttttttcggatcatcaaggaacttcagcttgtatctggagaacatccagtgcggcgtccagcccgttacgatgatcggctttttccggtcatatgatttcttcaatgtcgccgtcatggcggcacttgacgccgtgacgacattccagtctttcaatccgtaatccttcacggcctcatccgtcagggccatgatccccgatcccggatcaataccgataatggttttgttcacctggtccgcagccgttgccttaccatcagtctgcgaaccgcaggcagccaaagaaagagccagcgcagcggtaacgccgacaccgatgattttcttaagcatcaggcattccccctgctcttcttcttcactttaatgttttgcgtgatacggtcgagtgtaatcgctacgataacgatcgcgataccagcttccactccgacaccggttttcaactgtgtcacggcgctgtatacttcagaaccgagacccggcgcaccgaccatggccgcgataacgaccattgacaaagcaagcatgatgctttggttaataccggcaagaattgtttttgtggcaagcggaagctgcaccttgaacagacgctgagacgtcgttgaaccgaatgcttccgtcgcttcgatcaaatcagccggaacttgtttaataccgagaaccgtcatgcggatcgtcggaggcatcgcgaaaataacagatgccacgacgcctggcacaaccccgatattaaagaagaaaattgcaggcagcagatatacgaaagccggcatggtctgcattaaatccagaatcggtgtaacaatgcggcggaccgtttctttctgagacgcccatatgccgatcggaaccccgataataatggaaatcaaaacagatgtgacgacaagcgccaacgtttgcagcatcggcgaccaatagcccaaataatcaataacaaggaatccgattaacgtaaagagtgcaattcctctcgtactgatccaccaagcgagagctgcaaaaataacagtcaataaaatagacgggatgaaacccaaaccgctcacaatcgcgtttacgaaagcggccaaaccgtttgagattccgtcaaagaaacccccgaacgtcatggtaagccagtcaacaaaccggtcaacgatatctgctaacggaattctaggcaatctgtccatttacttcaccccctgaacagaagaatcctgagcttgttcagcagaatcttcaacatttatataatcgttatttcctgaaagcgcgccgattaatgcgccttttacgacaatgcctttcatgcggtccttatcatccgtgacggcgatcggaatattcgcatcagacacgacatcgaaaatttccgtcaagtatgtgctttcatgcacagtcgtaaattcagtatttaaaatatcctgaagcgataagtcggattccaccgcttttttcgcatccgccgcgtgaatgacgccgagaagctgtttctgtttatcaacggcgtaaatagaagaaataccgagattcttcatgagctgcagcgctacacgaggccctttgtcaatccgcacggtttcagcgcgcttcatgatgtggcccgctgtcagaactttggataaatcaacgtcctcaacgaatttctcaacgtattcattggacgggctcatcagaatttcttcaggcgtcccgatctgaacgatgttaccatctttcatcagcacgattctgtcgccgatgcgcaatgcttcatcaagatcatgcgtgataaagatgatcgtcttgccgacagagtcatgaaggtctaaaagctcatcctgcatgtctttgcggatcagcggatcaagcgcactgaaagcttcatccatcagaagaatgtcaggatcattcgtcaatgcgcgcgcaagtccgacacgctgctgcattcctccgctgagctgatcagggaattggtgttcaaagccttcaagaccgacaagtttaagcgaatcaagcgctttttgctcacgctcttttttgtcgacgccttggagctccaaaccgtattccgtattttcaagaatcgttctgtgcggaaacagtgcaaatttttgaaagaccatgctgatttttttccggcgcacttcccggagctggtcttttgacatatttgttatcatgtcaccatcaatataaatattcccggcagtcggttcaataagccggtttaacagccgaactaaagttgatttaccgctccccgatagacccatgatgacaaatatctccccatcatatacatcaaagtttgcttgattgacaccaacggttgatccggttgctttcaggatctcttttttgttttttccgctggacagcatctgaatggctttttttgtctgttttccgaaaaccttagatacattttcgacttttatcttaattggtttctcatccaaattcatattttccctccataataagcaatctttaataccgtaacacgtttgtaataagtcaaacaaacatcataatcccgtttattttgtatcattactttaaaaacatccctgtgtcttattttcctctggtatgcttctaaatactctctaatcctccttattgaggataaattataaaggaaaccgggcttttatcaggcttgagaacgtttccatcgaatgtgctgcaaactgatttcctatcctttttttacaaaaacaagaatttttttgcgacattgtcccggaaaaagaagttttcgcctcctgaaaataaggaatattaaggaaaaatataggtctgccaacagacagctcactaaaaaaagcaccccaaaagggtgctcattgcgcaagctctgtctgtttcgtttcttttccgagaataataatggtgatgacggcaatcaggatggccgcacaaaagacggcgaaaatcactgtaaacgaaacgttccgggctgcaagcgatccgacgagaagcggaccgaaaatgccgccgattctgccgacggccgccgttgtgccggaaccggtcgcacgaatcaccgcaggatactgctccggtgtataggcgtaaagcacgccccatgcgccgagattgaagaaggacagcagcatgcccgctgtgagcagcatggccaatgaatccgcggcaccgaagaaataagcgctgcccgccgttccgagcaaatagatgactaagatggtcttccgccccgctttttcgatcagccacgccgcagagaaatatccgggaagctgggcaagtgtcatcagaaggacgtattcgaagctctcaatcatgctgtagcctttcatcagcatcacgctcggcagccataaaaacatgccgtaatatgaaaagacgacgcagaaccaaacgacagacagcagcaccgtcggccggatatacggtttcgtccagacacttcccgcctgcccgcgtatgctttttttctgcggcaatgcctgatgcgccggtgattccggaaggcttctccgcaagtacagcgcataaaatgcggccagcgccgttaagagcagcgcggcctgccagccgaatgacggtatgacaaagtaggaaatcaccgccgcaagaagccagcccgcggcccaaaagctctcaagcagcacgatgatccgtccccgcttttcgggagcggacgcttctgacacgagcgtcgaggcgacaggcagttccccgcccagccccattccgatcagaaaacgcaatatgagaaaaaccgtcaatcccgttgcgaaagcggatatgccgcttccgacagaaaagaataacagcgtgatcataaacacttttttccggccgatcctgtcggccagcattccgaatacaaaggcgcccgctgccataccgatggaattgacgcttccgatccatttcatttgatcgggtgttaaattccaatcagtgtgaagcgcggcgataataaacgataaaattccgacatccatcgcatcaaacagccagcccattccggcaatcgccagaagttttcgcggagtgacggcaggttgtttattcataagcagcacctcaaatcgaaaatgattaccgtataagtttacacctgtctttacacattgtcattatcttttttcgcaaaaaatcccgcttgccgtaagcaagcggggtgtgtgttaattctttaagactgcgtttttaatattatcctgaagctgttgaatccgtttcgcgccgtcttctctgatacgtctgttctcttcctcgatctgtttcgtttcctgcataccgctgacaatcgtattccaagacgtttcaatcgtctcaatgtcaatgctcggacggcctgccatacgggcaatctccacgctttggtttgaaatattttcagcgtttcgcttcagcatttcattcgtgcggcggtccagctcgctcattgaatcagccacaagcttttgccgtttgactgtgacagcctgaatgatgccgtttttgaaaatcggaatcgtaatgacgaaagcggaattgattttcccgatgagcttcgtatttccgcgctgaaggaggcggatctgcggcgccgtttgcagcgccaccatccgcgccatatctaaatcatagacacgttcctcaagcgcctgaagcccgtcacgcagcgtatcaagctgcatttgcgcaagctggtttccgccggccgctttttcttcataagaaggaatgagcgcctgcatttcctcaagcttcatctgcccggcaacgacatacttttcaagctccatgtagtagttaatgttgttttcatacatctcttcaagcgtatggttcgtctttgccatttcatctttgtattttgaaatttcgacgtggattttttcaatttctccgcccagggtgcggtacttttgaaaaatcttttcaatcatgctgttgcctcgtttgaacattttagcgagaaatccttttggttcatcgaaatcatttttgtcaaaacggtccatgatttttccgagctgcgtcagcattgtgcctgaatccgtgacacttgttgttttcatcatatttaagatgcggtcggagaacttcgagatttcaactgccggttcttttccgtactcaagcagctccatttggtttttcacgtcaatctgctgtgaaatgcgctgcacctcaggatcttggcgcagctgcaccctgatgtcatctgctttttgttcagaaatctcttcatttttatcaagaacaagcggattttgattttctgtcatgttttatttactctccctgcttttgcgtaatggttctaaacagctttcttacgagtgacggctccttatattcctgccgaaataccatgtcctccagccaatggacatcaaattggctttcttcaatataatgctcaatgtcctgatggcccggcggattatacaagatgatatcgacgccgaatttatttaaaaacaatagagcggcggcgtcagaacgtgtaagttcgccattttgttccgtatgatataaaacgagtttcggaacggtttgggcgtaatcaaacgtctgaatcaattgcagcagcgaagcgggcaggttcgtcgcctggcggaacaaatagattgcggcatcccttgcctgctccccgggcaaagccttcagccctgggtttctgcacatgtcagaaatcacattggcgatggcgttctgcacgcctgacgggagatgcttgtactgccagatgttgcttcttttcagcctgtccgcgtcaatcgctccttcttcgttcaaaacctgactgtagtgatactggtagttggctttcagctcttccgtaaacggaaaactgcggatcatgtgtgtctcctgatagtctgcggcggtatggagtctgttccaatattctttcgtatctttggaaacccccatcactttcgcaaaaaggttcggaacggccacccgctccctgtccgctttaaattgcggccggataaacgcccgctccttcgcaatgagaaataactcatcatacgtcgtttttaatgtcacggactgcggggtatgatccctgaactgccaaggcttatacatcatagattcctcatggttcagcacatgctcaatttctttcgttgaccggtaggccgtcgtggacgttctgtccggcttttctttcgggaatggctcaaggccgcctgttgcggggagctttatcacaaagctgagttcctcatccggatcaatcaagctgaacgggtcttccgcagtcggatgaaacaataggacgtcacagccgatcagcatgagataatagagaaaatagagctggcttttggcagcgtctccataccacaccaccttcggcatctcacgctctatatcggcttgttcgagccatggattcaggtggttcagcgaaaactttgacacatccaagagcacacgccggaaatcgggatgattcagcccgttttcatgccggtccgcaaaggtttccaaaagcgtcataaacgcggttctcagccggcggtgcataagcggatcagcgtgtttggcaagcagcctgcccccatcgagaaacgcgacaaatctggaaaccgaaagccctttctctttttgattgaccgaatggatgtgctggagcgcctgaaacgtttccggcgcgatggtcttatccagcgtctcgcttaacacatggatgttttcatgagaagacagctcgaaaagcttattgtaatactccgtctcatcataaggagtacccaaaatccggacggcaagacgggtaaacgccagcccgttttcccgctcgtaaccgggacgttccggcagcggccgcatcagaaacgtttcccagtcatcgttttccggctcggcctttcggatcaccaattcttcctgcctcatcattttcctcctttctcttcatgatgatcggtacaaaaaaggaaggaaatgaactctccctccttttttgttttattcttctttagatgcagccgtttgctcctgaacctgcttttgtttgttgaaatagtggataataaacgttaccacaaacgcagcgatgatgattccgaagaacaccacgtgcggcatttcataatcaaaggcgctcgccgccattttcacggcgataatcccgatcagcacaaaagccgtattttcaagctcagggattttatcaattaaaacaaggaatacttttgcgactgtacgcatcatgagaatgccaagcataccgccgatcaagagcacccacactttttccgataccgcaaacgcggccagaatgctgtcaacagagaaggccaaatccattaactcaactgaaacgacagtggcccagaaaattccgaacgtacggaccatccatgaatttttcttcatgccttccgtatcgtcatcaccttctccgatccagaaatgcttaatgacgagccaagccaggtacagcgcgccaagcactttaatccaccagaacttaatgagcagcattccgatcccgataaagataaaacggaaaatatatgccccgaacaatccgtatgttaatgctttcttccgctgtttttcaggcagatgccttaccatcaccgcaagcactaacgcattgtcggccgacagcagcccttccagcagaaccaaggaaccgatcagcccccatgatacagggtcagtcagcacctcaccccacattttccaatcaaaaaaggaagcgtaggtcgacataatatgatgtagaaaatccaagttttttcctcctatttagtaaaacggtaatttcctgcttacacctgcaagccgtaattccggcaaagtgatgccagaccgccggaaaacccgctgccgatggcgttaaacttccactcagccccatggcggtaaagctcacaaacgacaaccgccgtttcaatcgagaagtcttcccctaaatcgaaacgaagcagttcattctggctgttttcatcgacgacgcgcacgaacgcgttcgaaacttgtccgaaattttggccgcgcgcttccgcatcatgaatcgtgacggtgatgccgatcttttcaatatttgcgggtatttttgagaagtcgacgataatttgttcatcgtctccctcgccctcgcccgtccggttgtctcccgtatggatgacgcccccgcttgggtgttccaggttattgtagaaaacaaaatcaagatcatttacacagttgtcatgggcatcgacaagaaaagccgacgcgtcaaggtcaaagtcatgccctccggagtacttgttcgtatcccagcctaagccgatcaccgcttttgtaaggccagggttcgtttttgtcagatcaacacgctgtcctttcgccaattgaatagccatgtgccgtctctcccttctgtgtgtgatatggttcagccgatttgcaggccgtaatctgtcgcaatacgggccagtccgccttggtagcctgagccgatcgcggaaaatttccattcgccgttatgtctgtaaagctcccctgcgataatggctgtttcaattgagaaatcttcagccagatcatagcggatcagctcctcatttgtctcttcattgacaatgcgcacgaacgcgttggaaacttgtccgaagttttggccgcgcgcttccgcttcatgaatcgtgatgacgaatgaaattttgtcaatagccgcgggcaccgcgctcaggttgactcttacgctttcgtcatcgccctcgccctggcctgtcaggttgtcgcctgaatgtgcgacagagccgtttccgccttcaagctgattatagaaaatgaaatcatcgggcgacgcgcatcttcctgcttcatttaatagaaagacgctggaatctaaatcaaaatcatgtccgccgtcgtatttgtttgtatcccagccaaggccgacaacgactttagaaagacccggatttgttttagtcaaatctactttttgtccttttgccaatgaaattgccatgtgtgcactctcctttttatcgtttaggcgtatcggttaacgatatcgccgatttttgtatcgtttgtgccttctcctactgcggcgaatttccactcgccgtcctggcggtagatttcagccgcgatcaggctcgttctgcctgaatagttatctcttaaattgtaagtcaccagttcttcgcgattagcctgatcaacgacgcgaatgaacgcgttttgaatcatgccgaagtcctgttttcgtctgacgcagtcgtaaatattgacgacaaacacaagtttattaatctgagcgggcactttcgccaaatcgatgaggatttgttcatcatcgccgtcgccttcacccgtcaggttgtcacccgtatgtacgacaccgccgcaccggcttttcaaattgccgaaatagatgacgtttttgctgtctgtcattttatcattttcaagcatcagtacggaagcgtcacagtcgatattggcaccgcctccgccgaacagctttccgaaaaagcccccggatgatacagggtcccagccgagtccgaccagcagttttgacaggccggcttttccttttgttaaatcaatccgctgtcctttttgtaaagagatcgccatatgattcactcctattctgtaagggtgccgctaagcacgccgcaagtgcgcatttttactaaattccgggacaagaatcccggtgtttattaagatatacgtcttttattatatcaaagtttcataaaacataagaatttttggcgaaaaacggcgaaaaattacttcctatattctccttcgttccggagaaaatagagaaaacaaagaaattgacgaagactgaacatttttcctatccttgtatcaatacatgtcaggaaaggggcagacgagtgattgatttaagcatacttgatcaggcgcccgtatccaaaggaaacgggccgcacgagacgctccgccgttcagcggagctcgcccgcctcagtgaaggatggggctataagcggtactggtttgccgagcatcacggcacaagagggctcgcaagcgtttcgccggaaattatgatcgctcataccgccgcagccacaacgtccatccgtgtcggatcaggcggcgtgctgctgccgcagtacagcccctataaagtcgcggaaactttccgtcagcttgaggcgctgcacccgaaccggattgaccttggggtcggacgctcaccgggcggcacgacgaaaatccggctcgccctcacagacggggtaaagaaaagcatgaccgagtttaacaggcagcttcaggatttatcatcctttctgacagattcggttccctcggaccatgcttatgcaggaataaaaacagcgcctttgattgaaacagccccgcagctttgggtgctcggcctcggggaaaacagcgccagacgcgccgctcttcaaggtgcgggctatgtcttcggccatttcattaatccggaacgcggggaaaaagcttttcagatctatcgggaccatttccgggcctccgcccatttttccgctcccgcctcgctctgtgccattttcgtcatatgcgcggctacggatgagaaagcggaagaactcgccttaagccaggatttatggcttcttcgtgtcggaaaaggcgccgacagccgcgtgccgagtgtggaagaagcgaaggcttatccatattcgccggaggatcgtaaacagatagaagaaaaccggaagcggatggtgatcggctctcctgccgcagtgaaacgccgtctgcttgaactttctgcgcggtatcagacaaaagagatgatggtgctgtgcaacgtctttgatttcgaagcaaaaaaagagtcatatgagcgtcttgctgatatatttctgtaaaaaaagccgtcaaacggagcagcagatgagactgctgcaccgcttaacggcggttttttcgttcttttccttttttaaacgcattccaaatcccttgcagcgtaaacccgagcagaagcagaatgattaacagtaaagtgattgacggccccggaggcgttccgagctggtacgaagacgtcagccccatgaacacactgaaaagagaaataataatggctgccgcaaacacccatttaaaccctttggcgatacggattgcaaaagccgcgggcagtacgaggagcgcggaaacgagcagcacgccgataatcggaataatgaccgaaatcgccagccccgtcacgatgctgaatgacattgacagcaggtttgtgttaatgcctgatgtcttcgccgtcgcctcgtcaaaggtaagcagatagagcggtctgtttaatataatgaaataaagcagaatcagcagggtaatgcctccgataatatagacctgctgctggctgaccgtgacaagcgatccaaataaatattgatcgatgctcatcgacgcgccgccttttgacaggctgatcagaaacatcgcaaacgacagcccggccgccattaagattgcgatagatacctcggaatatgtacggtacgcccgccgcatgtattcaatgccgatcgctccgatcgtgacgacaacgatgctcgccgccgtaatattggtactgagaaaaaaaccgatggccacgcccgacaatgaaatatgagacagcgtatccgccatcagcgcctgtcttctcagcacgagatatacgcctaatatcggcgccataattccgatcatgcttcccgctagaaaagctcgtcgcatgaattccaagtcaaacatttccatccgcctttttcccccctttcaagccgtatgactttatccagatactgctgtacttcgttttgttcgtgtgtcaccatgacgacggtgcggttgtgatttttcacctgatggtgcataaattcgtagaaaccctgcctgctttcataatcaaccgcggttgtcggctcatcaagcatcagcagatccggattgctcgcaagcattctcgcaatgcagattttctgcttctgtccgccggataaatcgccgattttccggtggcggaaatcccacatttccaccatcttcagcgcgttttccacctcatggtgatccgtttcgttcaatcgtttaaaccattttcctttcgtataacggcctgattgcacaagctccagaaccgtacttgggaatcctgcgttaaatgaagaaatctgctgcggaacatagccgattgtcaggcgttttccggctgcgttttttttactgatctcggccgttccttcccaaggtctgagcatgccgagcatgactttcatcagcgtcgattttgacgcgccgttcggtcctgtaatgccgacgaattcgccgcttttgatttccagcgacacgccgtcaagcaccggtgtatgcgaataaccaaaaacgatatcttttaatgtaacgagattcatgctgaccttcctttcccgcatagaaatagtgtgcaccccgcggcgcacactatgttatttaaccaatagcgaatctttcagtgcatcaaggtttttctccataatgtcgatataaccgatgcctttatcccgttctttttggcttaaaccttccagtgtattgagcacttccgttttcgcgccgatttcaccggcaagtgtatctgcaactttaggcgatgcaacttcttcaaagtagatgatcttcacatcatgctgtttggcaaacgttttgagatccgccagtttggccgcactcggctcttcttcaggagaaaggcctgcaatcgcgacttgttttaagccgtattctttggcgagatagctgaatgccgcgtgctgtgtgatcagttcttttttcgccgctttatttaatgttgtacggtatagtttatcaagatcctgcagttttgcaatatattctttactatttttctcatagtatgctttattcttcgggtcctgttttacgatctgcgccgtaatggttttgacctctttttgcgcaagaaccgggctgagccacacgtgagggtccatgctgtggctgtggtcatgaccgccgtgtccatgttcctcttcctcttcatccgaaccttcgagtaagtcaattcctttcgacgcctttacaaacttcgcatgatcagagcccatgcttttttccgctgaaggaacccatgtctccatatattcgctgttgtatacgaaaagatcggcgttttgaatgccggcgatatccttcggcgtcggctcccaatcatggggttcgaccgaagacgggatgagaatgtctacatcgcctttgtctttgacaatttgtttcgtgaattcgtacataggataaaaggtcgtcacgacgtgcagtttgccgctttttgaagaacctgacgaaccttttgaagatgaattgccgcagcccgccgcgattaaaaagcatgccgcaatgacaatgattccgctccattttttaaacaagccgtttccccctgttctgtaaatcagaatgataacgatttccaaagcgtactttctcgttcatttgttacctataccataataaaacgaagtaattacgttttgcaagatatttttttctaaattgatatccaatttacctaaaaagcccccgccatgtatggacgggggcgtcctatcacatatcaggcaagcagataaactcttgtttcgtatgggcggaatgtgatgcgggattccgtgccgctgtcattatcatagttgctgagaagcagctcggccctttcaggttcggaaccgtccggccaataaaaagcggcttcttctttcgatacgttgctgatggacatgagtttttgtccgtttgcctgtcgttcatacacaaacagctgcgggtcatcagggagcagcagcgtgtagctgccttttatgatatcagcatactgttttcgcaggcggatcagttttttgtaaaagttcaatatagaatcgggatcatcctgagcctcggccgcattgacggttttgtaattgggattgaccgcgagccacggttcgccctccgtaaatccggcattcttgctgccgtcccactgcatcggtgtacgggcatggtcccggcttttcgccataatggacgccatgacttcttccctgttccggcccatttcaaatacccttttatgatacatattgatggtctgaatatcttgataatcctctattctgtcaaacggagcgtttgtcatgccgatttcttccccctggtaaatgtacggcgtgcctttcatgaaataaagcagagcggcaagcattttggcggatgctttgcggtatgtgccttcgtctccgaaacgggatacgatccggggctggtcatgattgcaccaatacagcgtattccagcctcgatgttccagtttttcctgccaatctgtgagcactttcttcaaatcggacagctcaagcggttttacatcccaatgctcttggcccggcttttgatcaagctccatatgctgaaaatgaaaaatcatattcagttcatgctcatcggttcccgtgtagaccagcccttcttcaggcgtcactgatccggcctcgccgaccgacatcacgttatatttggaaaatacctctttcgtcatttcttttaagtaatcatgtatccgtgccccgtttggccgaaaaggcttcggatcggcccggcgggcgatgtaatcttcatatggcggcaagtattctttttttgacagaagatggagctggtctattcgcaatccgtccacgcctttatcgagccaaaatctcatcatctcgtacacggattgccgaacctcgggattttcccaattcaggtcggcttgtttgacggcgttcatatgcaggtaatattcgcccgtatgttcttcgtactgccagacggattgtccgtaatccgacacccaatcggtcggcgggccgtccgcggtgcccggccgccaaatataataatcgcggtatttgctgtccggattcatttccgcctctttgaaccaaggatgctccgtggaggtatgatttaagacgaaatccatcacaagctttaatccgcggctgcggcattctgtaagcagatcgtgaaagtcctccatcgttccgtaagattccataatcgcttgatgatccgtcacatcgtagccgttatcgacgtttggcgacgggtaaatcgggcagatccatatcacatcagcgccaagttcttttatataatcgagacgcgcgataatcccccgcaggtcgcctataccatcgccgttcgtatcttgaaagcttcgcggatagatttgatagacaacggcatctttccaccagtcattctccatcttgcggccctcctgttttttagagaaccatttcctttatgatccttccctaaacaaaaaagagaaggtttccccctctcttttatctgtccagctgagacggataaagcgtcatgcctccgtcgacgaaaagtgtcgttccggttacgtaactcgcttcttccgacaccatccatgcggcggccgcggcgacttcttccggttttccgaaggcgttcatcggaatttttttcagctgggcctgtttatgtgtttcatcttccagatccttattggactccgtggcgatcgtgccgggagcgatggcattcacccggatgcctttgtctgcgtaattgagcgccatcgtttccgtcatcattttgatcccgcctttggatgccgagtactgcacgttttcaggacggggtatttgctgatgaacgctcgatatgtttaagaccgttccttttttgccgcgctcaagcatatgtttcagtgccgctttcgcccccaaaaaggtgccggtcacgttgacgtcgatgaccctttgccaatcctccaggctcatttcatggggcatcgcttcggccccgttaaagccggaattgttgaccatcacgtccacacccccgaaatgctcctgggcggcatcaaacagcgcctgaatcccttcttctgaggatacatcggcttttacggtgacggctctgcctcccgctttctcaatgatgtccgccgcttcttccgctccggcggaatcaccgaggtagttcacaaccacattcatccgctccttgccgaagcgttcggcaatggcttttccgattcctttcgaagaacctgttacgattgctgtttttccctgtaaatcctgatacattgtctcatttcctccctgatgttaatacagagcatgtacccggttttgatcggccgaaaacaaaagagatcataaaaagaacgatgaagccgaagctccctcgttctttttttcattatgcgtagttgttcatttgcagccttttttgcacgccgacaagcctgctgaaaaaataagatgccgctttgtagttctcccgtttatgaaagaaatgagccgcgtcctgaagcagttcctctgtgtcagccaacagctcttttgattccagaatgtcaaaatactctttgagtgaatcctgtccgccttccccctgataaagctctttaatcagacggaatttcgtcatatagatctcatcttcccactccgccgcgcttctcatgccccgcgcgcagctggcggcggcttcactgtatttttccgttttaaagtagatatgcgtgagtgaaaaaacagcctggatgacctgccggaagctgtgtgcttcaaatccggcagccgcccgttcaaaatcctccgccgccttgcaaaagtcacccagactgtacatacagtgcccgatattataataggccgcagcaatcatatattgatcatcaagccgctccgcgtgctccaaggcgcattcgaggtattccagcgcttttttatgctgctgggcgtccatcagatttccggcaatgataaatttgcactgcacccttctcattccgtataattcatatttcttgtaaatatcaagcgcctgccccgcgtaattcatcgaaaagaaagtctgcttgatgtgatagtacacctcagaaattttatacagaaactcggctttctctatgtcatcttccacatattcaagcttttcctcagcccgcttataatgagaaatcgctgagatgaagtttttctgcttaaattcatacattcccctgaaatagtaaaaataatattccagtaagccggtcagcttttgctggttcatctcaatctcagtgagcatttcagagaacggaggctggcagtcgccgtctttcatgggttttaatttatccagcatgatgcggtgccgaaattccatcaatgaaaaatacaacaataaatcctggttctcttccatatcttcgagttcatattgaatctcccgcttcagcgcttcagcttgatcggcttcaaacgcgcggatcagcttataccattcattcatctttacggccacttcttcagatggaatcttggatttcatagattcgcctccttcctccagctactaattatgttatattttatcatagcaaatttatggcagtgagcaaacaaagattttaatcaattaaagaaagagagaattcaccatgaaacgaccagtcagaattgcgctgcttttgatcctcttcttttccgcagacctatgtttttcctatgtgcagaaagaattgaggccgcagacggcattacaagatagagccattccaagcgctcttcatccgctcgtgaaacagaatgcggagctattgcagacggccgctctgaacaaaggcatcaccgtcgttatcacagagggtttcagatcaattgaggaacaaaacgaattgtaccgtcaaggacgttcaaaaaaaggaaatatcgtcacctacgcaaaaggcggggaatcttaccacaattacggccttgcgatcgacttcgccctgcaaaaaaaggatggaagcctgatttgggatatgacgtacgacggaaaccgaaacggcacgcccgattggcttgaggtcgtatcgattgccaaaacgctcggttttgattggggaggcgattggagaggctttaaagattatcctcatttacaaatgatccctggctaataaaaccttttcttttttcgcttttgcgcatcaatgtacggaggatagacaggcctgtacacaagcttatatccttcattgccggacggcgtaaaatcgcgctgccactccagccgcagatggaaatcggataaaaaagcggcctttgcttcttcgggagtaacggccggcaccggattgatcttctccagctgctccgggtcaatgtcaggcgccatgtaagcttccacaagccccgttacgggactgacaagtattctcgcagcgccgaaccgcagcggaatatcctgatgccatatggaaaaatggaagcggaacctgccccttccgtccgttttcagcgggttcattttaaaaaactcgtccgctctcggataaagcttgtataaaaattgaagcgcgacggcctcacactcttccgcagaataaaaggccgggccctgatgctcaataaaagatttaaaggctgtcattttccctgactttttgtccgttttcatcttcattgtatttttgttgctgctttcaaaatagctttcgatactcaaatctttccgttccggaaccgaccctttccgccatgtcgttccgatctcatccccgagatcgcgccggcgcgtctgaaccatatccgaggtaaaccccattaattcatccaggctgatttcccgtttatgttcaaacgcgggaagcggttttgccggctcattcctgtcttcgcaaagctgctgatccggcacgatatcatcttcaccggccggatagctgtaagccggcagaatcggttcatagacgagacgcggtattttctcaaaattgaccacatcatagacgagactgaatgtcagcacactcatgtaatgcgagacgactttttcccgatcgacgaatgtttccgggacgggcgcttcacccttatccccgtaatagataaactgcacgacgaagccgctcctggttacatcaacgaaaaaacctgaatcgggaagcggccggcagagcactttttttgtatagataaatcggatgcacccattgcgttcttccctcgcctgaaagatgaaattcataaaagtaagcgggcggtgtctcgccgcaaaccgaagagccgtcagctttaattcggcgtctgacagctgcatgtctgaacccggacagtcgttgcgtgaataggtaagcaaagatccgtcgtcgcccagctcaatcgtgaccgttttatccggatggttacgatctttccatatataataggctttcgttttttgtttttcatcataatcttctatttcaagctcatagtccggcggtatgttcccgatttccagcgctttttttctcagatgttctttcagcaatggggtcatcctttcagaagagtgtataaaaaagaactgttttttattatataaaaacgtccttatccttttaaagggaagaaagtgccttttatgtgtctatttttagcaaagagggaaaagagccgtattcagagcggctctttttcatacaaatgtcacattccccgcgaaagccccgggacgaacgcccatgaccttcagcctattaaactcgtgatcgcttcccctgtatgagcctcaataaacagcgggaaaaccggcttgtatacgagcctgtacacttttccgcagctgtcgtcatcgtaacaacgatcccaagcgagctcggctttgatggcccggcggatcgcgtctttcgcctcttccattgtcaatgaaggaacgggatcgatttcctggagctctttcggatcaatttccggcggcatatatacagtgacaagacccgtctttttgctgacacagattctcccctctccgaatcgcaaatcaacgccgcccgaacaagccttatatgtaagtcccacgttttctccttcatcatccggctcatcatattgaacccggaaatactgatccgcttccggaaacatggcgaataaaaagcgaatggccatgtgatggcattcttcctcggaaaacctcggttcgccttcaacttttataaatgacatcaccccggtgagccggcccgattctttatcatgcattgttttcaatacgtgttcattccgttctttaaacagactttcaaagcttttatcttcccgtacggattttgttttttcaggacgccaggcaacgccgatacagccctctccaagatcgctttccctctctttataaaaaccgtcgtgcagcccgatcatgtcattgatgctcaacttttccgcttcaggtgcagggcgtgaaatcgggacatacggccgcgtgtcgtcttccagctcttcatattcgtctaattctacattctcttccttcaggtcggccgatatcggccgggtcggagacacgatttcatagacgagatggggcttgtcatccccctgcacatagacggactgatgcaggacgctgaacaacagctctgcttcaatatgtttgacaaagtgagccaatgcttcccgcttgtccgcaattgtctccggtcttaacagatcatcggccttcccatggtaagaaaagccggttacttcccctgtcacagccaggtcgatgtaaaacccggtcagcggaagcggcagaccgtcagccatctgaacataggaatatctcacatcgccatcatttgcgggtccgtttttttccggttcaaactcagccaatgcccccggacgatgggtttctaaaaacgcccgcatccgttcttctatgtccgattccgaaagagccggcagatcagtctggaaagccggacgggataagtatttcagttttccgtcccggtctaattcgacaatgatgccggcttccggatcattcttatcttcccaccaaaacagaacctcatcttcctggtattcttccacattactctcgtagcgggcaggtacgtttccgattcggagagccagctgtttcaactcttcttttttcatcataacacttccttttcttccaaaaagattgatgattaccaagactcttttatacaaaactagtataattaacctgtctgtcttcatgactatcgaattaatcattaacaacagggggtaaaccagatgtccatcaaaaaaatgagcgccgtgtttttcattctgcttctcacggcatttaccgccgcgtgcaacagcgaaacgagcggcggccaggaaagcagcacggcgaaagtgaaaataaaagagacggcatgggccgcttcagacgatactgaacatccggccgcgctgaaagtaacggtcaccgtcaaaaatacgggcaaagacccgcttaccgtcaaaagcagcgacttctcgctttatcaggatgacgcgaaaacagccaagaccgataaggaagacttgatgcagagcggcacgcttcatgcgggtaagacagtgacgggcaatctgtacttcacggctgacgaaggcaaatcctatgaattggtatatcagccgcaggcaaaagacgcgaagcctttatcttataaactgaaagtcaaaggcacagcctccaacacaaaacctgacccggcggacgcattatccgcatacattgatgtgatgctgtacggcaagcacaataaagatttcacccgcctgaccggtgtaaatgaaaaaatgacggccgccgcatatcaggaatcggcgaaagccagctttatcgcttctgcaggtatatcacaagaacaggcggattcaaaagccatttccgctattattgacgccatgtcatcagcgcttcgggataacacagagctcaaggtgcataccaagtccatgtcaggcaaaaaagccgtccttgaagcaaaagtgacgccgcttgatatgtctccgcttgcgggccagctgcaagaccgcgtgcaagactatgccggaaagcaccctgatgctgatgaaaacgaaattgtcagccacctgctttctgtctatccggaagagtttatgcgcctcaaaccggcttcttcttctgttacaagagaaatcgagatgaagaaaaacgcccgcggccagtggtatctggatacagacgccgatctggaaggattgacagaagcgtttttgaaaacgtcctgacaacaagaaaggaaatagcgcaggctatttcctttttttattttcacttaaagatgtcactgatatattgaacctcatcctcggttaactgcacatgaagcgcgtccagattgtgtttcagctggtcggggcgtttggctccgggaatgatcgcatccaccgccggctgcgacagaagccatgcgagtgcgatatgcgctgtctgcgcccctttttcctccgcaacggcccgaagcttatccactcgctccagattttggtgaaaagcttctccctgaaacggcggcctgttctttcggttgtcctcaaagactgtgtcttttgtaaactttcccgtcagcaagccggaagcaagcggaaaataaggaataaaggaaatgccgttcttttcacaataaggcagcagatcatgctccgcctcacgctgaatcagtgaatattccgattgaaaaacctctaaatagccgtcggcgttaaactcctgcaattgccggaagctgagattggacgcgccgattgctctgattttcccttcgtccttcagttcttttagcgtgcccgccacttcggagagcggtgttttgccgtcagggaagtggacgtaatacaaatcaatcacgtctgttttcagccgcttcaggctgttttccgcctcactccggagaaattcacggctgttgtccagctcgatttgtccgttgacttctttatgcgcgccttttgacgcaatcacgaggctgtcccgcacgccgcgctctgcgacaacttcaccgattaactcttcggaacgccccaaaccgtatataaacgccgtatcaataaaattgacgccgccgtccaatgctgtgcggatgagttcttttcccgtttcatcattaagattcggaaacagattatgtcctccgaccgcatttgcgccaaaaccgatacgctttacccgtaaatccgtcctgcccagcgtacgtgtctcatccatggctcaggctcccttccttttatcgctctgtttagtattagatagacggtaagaattatcctgcctgagagcctatctacagaaaaaaccttgaaaagcgtttgcccttcaaggtttttttggctgtgtattaagatgtcagagctgcggcgaagcgttcggcttcatccgtgagagcaccctcgatttccttatagcggctggaaatcgttgaggcgctgacgccgtacttcttcgccagcttggcttgagaaacggacgcgccgttcagagaaatgctgtttacgtaatattcgaccgccgccgcgaaagcttcaggctttctgatcgtcggtgtttttttgatacagaacgttttccacagatcaattacggccggaaccagctcagccgggtattcatccccgctcaggcctttttcaatagcgtctgccgtttccttttccatgtcgttggcccactctgtctgtttttcttcagcagcctgctcaggctcttccgccgttcctaaaagagcggccagcacaatgtcgaagttgtcctgcataaagcgctcaggcgattttccttccgcaagagccggggcagccgcctttttcactttgctgattagagcttcggtccgcttcacagggaagatcgtaaattgcatgaagaactccgctttttccgcttcgtggatcggatagccgagaatcaggcttcccgccggcggaagatcctgctggctgacgtccatttccactttgaattgttttttcgtcatcacatcttcaaagtgaatcattccttctttcacatcttcaagcaccataacggcaggtgtcatgcttttccatgattcaacgatttcccgtgttttcgggcggttgatgccgccggcttttttctgaagatattcttcaaaaatcgtcttgccgcctgccagcggacggaagaaaattccccagatgccgaggttgaagactccgatgtcttttgtctgtctgtccagctccgtaatgaacgcgtgctggttaataaatgatgatatgccgtctctatgtgctgtaaaggcgtactccattaggctttcctgaatctgtttcgcttcttttgccgcgatgtctgccggaatggcagcttctttgcttccgcagcattttttatatttcttcccgctgccgcatgggcaaggggcatttcttttcacttttcccacaataaaccctccgaattctgatataactttattattttaacaaaaataacttcagagggcttggtttacggcgaaaaaagaatatggaagaaaaaaagaccccgggatattctcattctccggggcttcgaaactgttaatttgtattttgtccgccgccgttcagaccttctttaatcagcccgtttacttggctgttcatcaaaagtccgatgtgtccgacaccgtgaatctgcacgtttttcccgccgatcagccgtgacagcgggttcaggacgattaagtccgctgagctgtaaatcgatgtatataaaatcttttggttcggatcagtccccggaagcgcccggttggtcacaaggccgttcgctccgcccagtgtgacgacgtttgcgattttgtctccgccgtcaagatttttaatgtaatagagcgtgttggcgccgcccatgctgtgcgcgacgatatcgacttttttcgcacctgtttcgctgagcacttttttcacgtaattggacagtctcggtgcattgtgtctgttgtttccggttttgtccagaaaatcaatggcgtacatctcatttcttgaccagccttgggatgccaagtacgttttgattcccgcgaagttaaaggacgccccgccgattccgtggaccatgacaaccgggttatgctctgaggaggctttcgatacggtcggctggaaggcaaatacggaaatgacggagagcatgcagactgtaaggatcgctaggattttgcttttgatttgtttcatgaactttcctcctgttatgtaattttttgcaattttcattttattagagaagaaaaggaaaaaatagagtattttttactgttttcaacaattgaaaaagaggcggaaaaatgagaaagacgcccctttcccgaaagcacacttatactttaatacggcaaacaaaaaaaggagagaacacccggttctcttctcctagtactcattaaaataggtttgaatccgcttagggtcatgcgtttttgtcagcgcgagcatcagcagaatccgcgctttttgagggttgagagagtttgaagctgtcaaatggtctttttcatacgctcgattaggtgttaccgttccgtttcccgtccttgtggagcggacgaccgccagcccgcttttgaccgactttacggcgcctttatgcgccgcatcagacattgagccgtttcccgggcctgcaaaaataatgccttgcgcccctgattttacggcagcttcaaagagatagcttccgtcattttgatagccgtatataatatcgacttgcggcagtttatcaagtttgtctatcttgaaatctgtatccttcgtatgctttcgggtcatgatgttattaaaatagatgtcatcagcaattgttccgatataacccatttcttccgatttgaatgtgtcggccgcggttgtattggtttttgtcacatagcgcgccgaagcgattctgtcatttaatacgacaagcgtccccttacctttcgcatcaggcgcagccgctgtttttacagcgttatataagttggacggcccgtctgctccgatcgccgtggacggcctcattgacccggcgacaacaacgggcttgtcacttttgaccgtcagattgagaaagtaggcggtttcctcaagtgtgtctgttccatgtgtaatgacaatgccgtctgtatcatcagacttgagcagcttgtttacccgttttgcaagtttcagcagtgtctcgttattcatattctggctgccgatattcacaacctgttctccgctcacatgcgcgacctcttttatctccggaacggcctgaatcagggcatcaactccgattgcccccgccgtgtactccgtagctgacgtctttgaaggagcagcgcctgcaattgtgccgccggtggcaagaattttaacattcggaagtccgtcttttttcgctgaggctgcggctgccatccggggcggtgtttctttcgcttgaggagattgggagcagccggccgcgatgaagagcagagccgtgataaatgtaatgaagggcatgaattgttttttcattcttttctctccttttctttatttatgaagattttcctctcaccggtcaacgcgcttgtcaggcaacctcccgaagaaaataaccgttaaaaaaccttgacaccgtcatgtgaaatcaagataatagaccagtcactatattttaaatttgtcaaaaatcagtaaggtgggaacattatgagctatggagattctcgtgaaaaaatcctcgccgcggcaaccaggctgtttcagcttcaggggtattacggcacggggctgaatcagattattaaagaaagcggtgcgccgaaaggttctctttactatcattttccggacggcaaagagcagctcgccattgaggctgtcaatgaaatgagccattatatccgtatgaaaataaaagaaagccttgatgcccatcctgatcctgcggaaagcattcaagcgtttttacaggacttatcaagccaattcacatgtccggaaaactttgaagggtttcctgtcggtttactggctgccgagactgctttaaagagcgaaaagctccagcaggcctgtcaaagcgcttatcaggaatgggagaatctgttcgcgggcaaattgagatcagccggtttttctgatgagaaagcggcggaaatcagcactgttttaaatgccatgatagaaggcggcatcattgtgtccttagccaaaaaagacaaaatgccgatcctccatatttctaaacaaatcccgaacctgctgaagacataaaatacgagagacatgtacgtatagaaagagaggagaatgattttggaaaacgctcagccttccaaacaatataaagtcatgccgatcatgatttctttactgacggcagggtttatcggcatgttcagtgaaacggcgctgaatatcgccctgactgacctgatgaaggagttacatatcactcctgcgaccgtccagtggctgacgacgggctatctgctcgttctcggtattcttgtcccggtatcgggtctgcttttgcaatggtttacgacgagacagctgtttatcgtttcactcgctttttccattatcggcacgctgattgcagcgcttgcaccgagctttccgtttcttttggcggcaagaatcgtgcaggctttaggaaccgggctgctgctgccgctgatgtttaatacgatcctcgtcatcttcccgccgcataagcgcggagcggcgatggggacgatcgggcttgtcatcatgttcgctcctgcgatcggtccgacattttcagggcttgtgttagagcatttgaactggcattggattttctggatttccctgccgtttcttgtgttggctcttttattcggcatcgcctacatgcagaacgtgtctgacattacaaaaccgaaaattgacgtgctttccattattctgtctacaatcgggtttggcggcatcgtattcggattcagcaatgcgggcgaaggatcagacggctggtcaagcccgacggttatcggttcgctcactgtcggtgcgatcgcgctcatcttattttccatcaggcagctgacaatgaagcagccgatgatgaatctgcgcgctttccgctatccgatgtttgttctcggtgtcgtgattgtgtttatctgtatgatggttatcttatcgacaatgctcctcttgcctatgtatttacaaagcggactgatgctgacggcgtttacgtccgggctcatcctgctgccgggcggtattttaaacggctttatgtctccggtgacggggcgcctgtttgacaaatacggaccgaagtggcttgtcattcccgggtttgtcatcacggccgccgtactttggtttttctcaaacattaccggcacttcaacggccattctcatcgtcgtgctccacacatgcttgatgatcggcatttccatgatcatgatgccggcgcaaacgaatggcttaaaccagctgccgccggaattttacccggacggaacggccattatgaatacgctccagcagatggccggcgcaatcggcactgcggtggcggtcagcatcatggcagccgggcagaagaattatatgagcaccgtgaaaaacccgaatgatccttccgcatactctcacgcgctgattgcgggcgtccagcacgcctttatcttcgcgatgattgtcgccgttatcggcttgatcagcgctttctttatgaaacgggtcaaagtgaatcactcataagaaaacagcaggctccccgtgagtctgctgtttttttatatatcgcgcgcttcagccagttcatcaatcgcatacatcagatcatcggccgtgttatagaaatgaggcgccagccggatgatatgtccgctgggtgcgcatacgatgtttttccgcctcaacagcgcagccgtttccgccgctttttcatcccgtatggaaatcatgccgggtctgtcatcggcagacggcggccctgtgagattcaatcctttttcagaagcgtattcatacgcaaatgcactgagtttttttacttcttggtgaatgcggtctgtgccggcatcgtttactagagataaagccgcctgtgccgcatatatgctgataaatgccggggttccggtctcaaagcgtttggctccgtccgcataagaaaaacgggttaaatccagcatcgacgcccgctgctgcccgaaccacccggtgactttcggcttcagccgttcggcaagttcctttctgacataaagaaacgccgttcccggtatgccgagcatatactttctcgcacccgcggccagcatatcaactccccattcttttacatcaatcgggatgtgccccgctgattgataagcatcgacaaaaagaagcgatcccttctttgcggatatctcggcaatgcgcttcatatcctggacaaaaccggacgtatatgacacatggggcacacaggtgaaaagcgtctgttccgatatgtacgtctcataccgctctaacgggatcattccatcttcagacggcacgactgaaagctccatctcagtctgtgccttcaaaatgtgggcgatcgccggaaaatccaattccgtatacaccgcctgtttctttcggcaatccggtaaagcggaaacgacggcagagacagcagccgttactgaaggtaaaacggcgatttcttcaggatgggcgccgatcaatttcgcaaattcacaccttgcctgctccgttcgtccaatggcttcttcccagtttccgccatgctgaagcaggctttcctgatagtcattgatcgcttttgaaaccggcagggcaagagcgctttgagagcagctggcgagcatcgtatgtgtgcggagcgccggaaataaagatcggtattgcaccagaggcgaattcaagacgtgtttcccccttcggcaggaatatatgtccattatagagtatggtaaaaagaaaaggagggttttatatggagaaaaaagtattgctgacaggctttgaccccttcggcggggaaacggtcaatccttcatgggaagcggtcaaacggctgaatgatgccgctgagggccctgcctctatcgtatctgaacaagtgccgaccgttttttataagtctcttgccgtactgcgcgaggcgatcaaaaagcatcagcctgacattatcatctgtgtcggacaggcaggcggcagaatgcagatcacgccggaacgggtcgcgatcaatctcaatgaggcgcgcataccggataacgaaggaaaccagcctgtcggggaaaacatttctcaaggcggtcccgcggcctattggaccggccttccgatcaaacggatcgttgaggaaagcaaaaaggaaggcattcccgcggctgtatcctacacggcggggacgtttgtatgcaatcatctcttttacgggctgatggatgaaatcagccgccatcatccgcacatccgcggcgggtttatacacatcccgtacattccggagcaaaccttgcaaaagtctgcgccgagcctcagcctggatctcgtgacaaaagcgctcaaaatcgccgcggtgaccgccgcggcgcatgaggacgatattgagaccggcggaggcgaacttcactaagctgcagacggcgcctcggcccatttcttccggtaaacgatgcgggacagcgtcacactgatttcatagaggacgagcagcggaatcatgacgagaaagtcagacataaaatccggaggcgtaatcagcaccgagacgacgatcagcacaaaatacgaaagcttccgcgcctttgccagccgggttggattcacgattccgagccgtgtcagaaacatgacggccagaggcatttcaaacaaaaatccgaacggcaatgtaagattcagcataaaggtaaaatacttgtccgccgtaaataccatgtcaaaatggccggcggataattgtgttaaaaatccgagcacaatcggaaacagcacaaaatacccgaaggaaattccgataataaacaaaaccgaaagccccggaatgtaaagcaaagcggcgcggcgttcaaacggggtcaaagccggcgccgtaaaacgccagagctgaaaagcggcaaccggaatcgttgccgtaagggcgcatattcccgcaatcatcatatatacccataaaatctcgctcggccctaaaacggccagcctgccatccaaatccttgatcagccagtcataaatatcctgcacaaaccagcaggcgccgataaaaaacacgagaaaggcgataacggttttaatgagacgctgccggatctcctctaaatgcccgatcaagtgggtttcttttttatccaatcgtacatcctccttatagagaaagaggcagaagcggattcgtctgcccccatgtcaggattcagcctgccgttttgtctttctcagccgtctgcttgtccggctcttcatttgagaccagtgtttttgcggcgcttttaaattcaagcagcgtgcggccggcggcacggccgatttccggaagctttgaaggcccgaaaatgatgagagcgatgacgaaaatcaggatcaacccgggaatgccgatatttgaaaacatgagtgtgcctccttattgtgagatttttgcccgtttctttctcatttgcttttcatgcgcattgttatgggcgaagaaacgatcctcttccacctcgtttgactgctttaaaccgcctgcaaccgccgcttgagaaaccttccgaatccccgtctggtctttctgataaatgaatgaagcccgcgtggatacctcagcccccggctccgtcacgtacggcaccactctgtaatccgctctccattgggcaggggtcaccgtacagcggacatagccgcggtaatcgttgaaaaacttaatatgcgggttttgttttaagatttgatccgtatcggcccgtttatccgctccgtttcctccagatgtaatggaagtcccgacgaattcggctccgaaaatctttgaattcgtttgattaaaatcggtatgcaggtttgacgcccagcttgcgtgaacatcacccgtcagcacgatgacattgttcaggtttttgctttttataaaattgatgacccgctcccgctgagccgggtagccgtcccatgaatccatgctgtatatcggattggcggttgttccgaaattccattgcgcgaaaaagatttgctgcgccagcacattccacttcgcttttgaggcggctaaatttccgaagagccattgctcctgttctgtccccatcaatgtacgcttcggatctctccactcatcagaaggcggcttattcccgtcgccgttggcctgatcatctctatactgtcttgtatcaagcacattgaacgatgctaaattgccataagaaaattgcctgtacagccgcatatcaggaccgttcggcaatgacatgcgcctgagcggcatgtgttcataataagcctgataagctgcggccctcctgagcacaaacgcttcaacggattggcctttttcagggataatattggcataattgttttccacctcatgatcgtcccacgtcacgacccacggaaatgcggcgtgggcggctttcagattggcatcagagcggtattgggcatgacggttgcggtaatctgacagtgtatacacttcagcgctgctgtgcgtcctgacatttcccgtttttgacacatattcgttcggtccgtattcataaatgtaatctccgagatggaacacgagatcaagcttttccttcgccatatgtttatacgccgtataatagccgtgttcatactgctggcatgaggcaaatgcaaacgtcatggcggatacgtcagcaccgggagctggcagcgttttcgtccggccgacgggactgagctcatgcccgcttttaaaccggtaatagtacactttattgggcttgagcccgtccgcctcgacatggacggagtgtccgagattcggcttggccatttccgttccgcgtttgacgatgtgacgaaaatgttcatcagcggcgatttcccattttaccggcacggcctgcttcggcatgccgcccccattcagcgggtcaggggcaagacgcgtccagagaatgacgctgtcagacagcgggtcgccggaagctacgccgagggtgaacggatagtttgaaaatttcggagcggcattcacttcaaacgcgccgatggattgcgcgatcgctaacccgagggaaagaccggcgattttcccggcgccctgtataaatgcgcggcggtcaaacgtattgttctgaaagcttttgttctccaattccttgatccattcatctaaacggccgtcatgtgtcatgtcagttcccctttcgtctcattgatcgcccttattataaaaaagaaatgttaaaccgctatgaagaagtgtgaagggtttgtaaggctgaaaaatggacggcgggagacatttttcacattgtttcgacaaaccttgccccgccgggagaaaaccccctctgtttctttttggcttgtcatccgtcaagcgaacttttttcctatttttcttcacaagaaattaaaaaaacaccgttcattctcagaacggtgcgcccgggattaaaatgtattgtacacgttttcgcacgtctcacctgtcggctgatagaagcagtgggatttgaatctcgcgacaaacggctgatcataccaagtcggcgggcagtttcccggcggcttaaaataccacagactgaacttagccggccaaaaccgttctccgttaatcgtccggcgggcaagcctccgctcggattcacgcggtctctggtaaaagtatccgtgagtcaccgcttcaaacgcgtgcggctgaaacaccatctgcctgatggtgcgcaggcctttaaaatcagaacaattcgcccgcacccgattgattcccacattgccgaccaaaagcattccctgcttcccttcgccttccgcttccgccctgagcagccttgccattagatccagatcggcgctcgacgcttttacgactgccatcatgacacctcccgtattttctcccttcatcatattcagccgcggcccagtgatgacagacaaaagccagaaaacaaatgttcacgaaaaaagggtttatatttcacgttatgaggaaacatactaacatgatttccataaggaggaattcgcatggaacacattaaagcgcttgccatcaaaggcattatgaccatcattattctgtatctgatactcggcttaggttttcgctttacattcggcgacgtgctgctgatgaccattgtgctgggagccgtttcttactttacgggcgacctgtacgtgctgccgagatggaataacatcacggcggcgtccgctgatttcggaatcgcgtttcttgttgtctggctgatgggaatgccgctgtccatgggcatttccggaggaagactggcgtttgccgctcttatttccgccgtcatcatcgccgtcggagaatattttttccatatctatctgatgagaaaagacttgggcgggtcccgttttttagaaccccggtccgaataacgtaaaaaaggccggataaaagcccctttaaagggggctttttatttgtaaagtataaacgctttatacatcttgatataactgataaacccttttcagcctttcttcgagctgttcaaaatgaacaaagcgggcttctctcagaaactcagtcccatcaatgaacaaaagaagcacgggaacagtgaagcctgaaaatctgccggccacctcttctacctcgtcagcattgatatgccccaatttgatattcggaaactgatccaatacttttctgagctgcggcagaacagcgtgacatactgtacaggcgggtcttgaaatgtagataaaactgaattgatgctgtttaataaaattctcgatagaatctaatgaatgtaattctgccatctctttcaacaaaaccctcctccaatcggctcgtctttcatgaccaagctcatcaatacgcgtacattcactatacacatttatattgaacatatccgcttttttgctattcagagcacctgaacgttgtgcttgaaaataaaagaacagttaccgcttttcagtaactgttcttagatacttatattaaaaatgcaaagcgtacgcccctgaaccgatgagtgcaactccgatggagactgcaatcagcaccaagttatattcaaaaccgccggcaccgttggcaaatcctttcgctccatggacttttacgatggcacctaacataataatcgttataatagcagctccgagcgggaggaaaacacctaaaataaatagaattccgcttgcgagttccccgagacctgataaagcggccgcggcattacctggtttaactccaattgactcgaaccattgtccggttcctttaattccgtatccgccaaaccagccgaataatttttgtgatccataaaacagaaacaccacaccaatcatgattcgaataagtaatagtcctgcatcttccatttttatctctccttatttttcatattatatgatgtctgcaaggcagctgtttaccaacagtcgcttccagcaaacatctgttaaatgtatgtcttgttatttttcttcatgcttcacgttcatctatcaatcaatctaattctctcacttcaaacggcagcagcccttgttcaatttgtgcccggtgcggttcatactgctcagggagcatcagttttccgcccattttttcttgtgactcatcatgggcaaagcccggcggatcagttgcaatctcaaataagatttccccatgttctctgaagtaaaccgcattaaaatagtttctatcctgaacaggagtcacaccatatccgtgcgcagcaatgaacctttgccaatctaattgatcttcgtcatcctgagcccgccaagcgatgtgatggaccgtgccgatacccatttgcccgcggccgataggcgttaacttaaggtcaatcacatttccgatatcaccggcagaacgataacgaacgaagtctccttctttaccgactcgctcaagccccatgatattttccagcaattcacctgttttttcaggctgtgctgataacagggttgcaccgccaaagcctttaatggcaacatccggggttacatctccgaaagtccacgtattggcctccactgcttctctttccacgatttctaaatgcaggccatgcgggtcatcaaattctatatattgttctccaaaacgctcgatttttgtgtatggaatgttgaacttttcaagtctcttttcccaaaacgccatggcacccttcggcacggcgtaagatgtcacgccaacctgtccgtctccaatgatgccttggcgggcgcccgcccacggaaagaatgtgatgattgttcccggcttcccgccttcatccccaaaataaaggtgatacgtacccggatcatcaaaattgaccgtttgcttaaccaatcgcagccccagcactccagcgtagaaatcagcattctcttgagggtgaccgacaattgccgtaatatgatggatgcccatcgtttttttcgccatttttatttgcttctttacaaatagttaaatatactccacaaactcattcacaggctttcggtagccgcgcggccttctgctttctattttttctttcccgattgtaatcatcatgacgacctcaaattgatcatctatcttcaaaatctgtttcacggcttcagcatcaaaccctatcatcggacaggtgtcccagcctttttccttagcactcagcataaacatcatcgcagaaagtgaagcatttcttatcgcctcatctctcttaaatggttctcccctgttttcataaaacgaaacggtgtcttgaaccatgtgatcatactcttgtttatttaatacccccagcatcttcaatccttcatagatgtcagccgcttgctgatatgcctgcttatcccctaaaaccaaaagaacagctgatgagctaaacactttatattgtccgtttgcggcctgtttcagcttttcttttacatccgggtcaagaaccgtcacatattttgtgtgctgcaaattaaaagctgatggagccaacgcaaccaattcaaacatttcattgagctcatctcttgtgattggatgttctggaagaaagttgcttgcagatcttctttcattcactagctgtacaaattcagccatttccctcgcaccccttttatctcgaattcgagatattatagtataaaaaatcaaataacgtatgattaaaaaacgaaacgttctcttcactgatcttttcgtgattcaaacgatcggcaggttcttatactgcactctaattaaattatcttgaattaaaaaatcttgaattcgagataataataaaagataaacactcaaatgtcaacagttctttttttaattcagcgccattttgtctgtgtactgtttagccctgctccaactttttttctgtcaccttatttattaggaaacaggaaacaaccttgctatagacccactcgaaactgaattggtacgataagcaaagtgattacacaagaaaggatacggagagcgaatcaaaagcgcctctatttttttgtgcagttttataggaggaaaaaatgacaagtgaaagagaacaaataagcaaaaaagttgctttgattgcattgatagccaatctgatcttaatggcaggaaagatcttttttggactgataggcgatagtgaagcagtttttgccgacggtatacattctgcagcggatgtcgcggcttcaattgctgtcctggccgtcatcggcatttctaataagccgcccgatcaagaccatcctttcgggcatggcaaagctgaggtcatcagcgaagcgattgtaggaatcatattagtgctcgtttccgtgtatattctgatagaagcgatttcgtcctttgttgaaggtccaagcatcccgcaatacagcgcattgtttgcggctctgatatcctacgcggctaagcagatcttatatcgttattcgatcaaacaaggggaaaaatggaacagtaaagcgattatagcgattgcatacgatcataaaggcgatatcgttgcctctcttgccgcttttatcggcgtcctattggcgattatcgggaacacacgcggatggtcctatctgttgtacgctgatgcaattgccagtgtcatcgtggcgtacctcatttttaagatttcaatggaattaatcaggccgtctgttgacgttctcatggaaaaaagtgttgatcccgaactgatagaggaatataaagccgttattttgcactgccctcaagtcaaacggctcgataaaatccgagcaagagaacacggccactataaattgcttgatgtccggttatctttggatcatgatttgacgattaagcagggacacgatattgcccgcgaaatccgaaatgaaatccaaagacacttttcagatgttgaagaagtgctcatccatgtgaatccttattttgaagaatgaaaaagcagcttgtagagaaaatgatgtttttctacaagcttttttgttttgtgctgtttctttacatattcatttgatttcaggtgcagaaaaagcactcccacatgcctagctttgcttggctgggtatgtggcaatcttcaacatcattttgaataagatcagcggatcaagtgagggggggctttatttttgttgcagtaaggtttgaccttttcaacgatgaaagagaagtctatgtatttatcaatttttcgaagaaggtgatcctcttcgacgagttggtcaaacagaacgaattcggctgtgtttcgagaaaaatttcttgtgtggaacatgagaaagaaaagacaccgttttttcagtctttcttttattttatgacaagagaaacataaaggctgtcgagattttctcgacagcctgaaggccggataacggcctttttcgtttgatttcactgatcaatatgctttctgataaaatgcagcagcgtgtttccttgagcggtcaatatgacgcccttcgcgccgcacttcggacagggcgtcccttccttctcctcgccggttccttcacaatgcggacacgtgagctcaagatcgtcggttgcgatcaccatgaatatccctccttttttgattgtctgtccgtctccagtcactttccatggccatcacctccttaacaatacaaaaaaaccccgtccatcaaaggacgaggttttcgcggtgccacctttattaacggctgataagccattctctcaaaaagtacagaaacacacggtttcaatactcctttcttgataacggggaagaatcccggcaccgcctactgtcatttcagcgcagcaattcagaagcccattcggcaccggacggggatcggttcacagcggccaccgactctctgaaccccgcgcgctgatgcgtacttactcttcctcagcattgttcatccgttcttttattttaaaatgtatcatacgctgtcatccggcggaagtcaataacctttcggatcggtcaggccgagcatgtcccgcgccatttgcatatgctcctcttgccccgtctgaagcgcgaacttcgccgtttccacagggtaagcggcctgccattctgtcacatgctgattttcgtttacaaaaatatgcggaggatgcaagtcgccatggatcagcacggaaaaatcaggccagtacgaactgtcatttatccacgtttgccatcttttccaaagccagcttaccggctgcctccgctgacaaattttgatccttcgcgtaaatctttcgcctccaaaaagaagacgtgaatgaattttttcatattcactttaaccggagaaagcggcacggtttccttagcctgcatttctttcattctcttgctgacagcggggaaatcaaagaatttcgaggcgtaatattcaaatttggggtttgaaaaatcagttgtgcccaatgaagcgaaatggtttaacgaatgaatgacggcccttctgatccgctgttccgaggctttgatttccctgttaacctcggcttgtgccgccgcaggccccagcttccggatggcgacgtttgtaaacatctgctttaaagacgggatgtttctttccgcctgttcatcctcaaataaatagtgaaggacggccatgaggtcatgcgccccgctttctcccacgatgcctaattccgataaaagaaattttcctgtttctttgattgatttctcgtgcatcccccccggcccgctttttttcggctcattccgctgaataagacggcttaacgagtgttggatgtcgccgatcgaggtttccagttcaatccgctcttttacttttcccaaaacggtgacgatctcgattttgttgatcggtttgtggataaagtattcgatgccgagagaataagcttctcccaccatttcctttgcctccacctgcgatatcatcaccgcttttccgttgtacgatccctgaagatgccggatcgtctcaatcccgtcccgacccggcatcagcagatcaattaataaaatatcgacttgtttaaaatggagataatgcccttcaatctggcttccgtcctctgcctcaccgacgacttctcctaagtcctcgtcctcgatcatctgttttaaaatggaacggatcgcccggtcatcatcagctataaaaaaacgcatattatgagttcatcctttctgcaatcaaatgcttcaccggcagtttaatcgtaaatatgacgccttttggcttgttatgaaaggaaatgtctccgtcaagttcagttacgatttccttcacgtaagtaagcccgatgcccgttgaaggtgtgccgaattcatcgtatttggacgtaaacccgggatcataaacgacctctccgattttttccggaatgccgggaccgtcatcttccgcctgaaattcagccttttctccttccgtcctgcgcagcgcgaggcggatctcacccctgtctcccatggcttcgacggcattggcggtcaggttatttaagatcgacaggacggtaaagacgtgataatcgggatgctctccttcaatcacgctccggaattgaatgtccttgcctaaagattcggcgtatttttcattgattcggatgacgatgccgaccagagcggcggcattcatgtaatcccggaatctctcattggaaatcagcttcgacaggccggcgaatattcgctgattgtcttttttcacttcatgaatctctcccgcaaggcgcagcattcggctcccgagctcccggtcgttcccgctcatttcccgatatagctgataggattctttcgtcacatgctccgtcgttttcagcgtttttttcaaatgaatcgtttcttcatataagttggacacaatcatcagcatgtgctcatgctgctttctcgtttgtttttccctgacctgagattcgtgcagcttcatcacgttgaaaaaactcagcacaataaatgtgtgagaaacagcgataaccgcaatatccgccagcttgtccggcatcataatctgccggccgccggaaaactgaaccgtcatttcaacggcatcggacgcaatttcaatgagaaaaccgagaaacccgatcatcagcggccgatcccaaaaaagcctgaccttcagcacataaaacaagcaggcatatgtaaagtaaaaaaagaaactgggatattggctgaaaaaagcctccgcaaagccggcatgctctcctccccagcacgccaggccgatccggaatgccacaacggctgcacctgtcaacagccctgacaatactgccggcacatgccgaagcagcagcagaaaaaagaaaaaagccggggcgccgaagctgatccgatatacctcattcagagggtaaaatttcagttcccccgccagcggcacggtgatcagcataagggcgaaaagatagccgtcttttttcagtaaatagtcgagcctgatcataatcacttccttcttctgtctattttgaacaagaccgatacagtccgcaaatttctttagacccgaatggcgggacactccggctgatttataaatctatcggcttattttaagaatgattttgtcgtattttgtatgattctgtagatgtcattatacattaacatggaacacgctatttttgaaaacgttttccaagaccggtttccgcttcggacaggcttgcaatagaggaggaatgttatgaaagatatggtcagagagcgccttgaaaaagaggaactggcttcacttttacaagattgggtcgagcattaccgaccgttttccgtcaatggaaaaagcgcaaattatatacccgccctcggagaaatcaacgactctcagctgggcatttgcatattagagccggatggctcaatgattcatgccggtgaatggaatgtcccgttcacattgcagagcatctcaaaagtcataagctttattgccgcctgcatgaacagaggcatttcttacgtgctggatcgtgtggacgtggaaccgacgggtgatgcgtttaattctatcatccggcttgaaatccataaacccgggaagcccttcaacccgatgatcaatgccggcgccattaccgtcgcctcgctgcttccgggtgaaacggcgcatgataaattagaatatctcttttccgtttttgaaaaattaataggaaaacggcctcacattcacgaggaggtcttccgttctgaatggcagaccgcgcatcggaacagagcgctcgcctactatttaaaagaaacgaactttctcgaggcggatgtggaagaaacgcttgaagtgtatttaaagcagtgcgccatggagggtacaaccgaggacatcgctttaatcggattgatacttgcgcatgacggctaccatccgatccgacgggaacaggtcattccgaaagatgtcgcaaaactcgccaaagccctgatgctgacgtgcggaatgtacaatgcgtcaggcaaatatgcggctttcgtcggcgtcccggccaaaagcggggtatccggcggcattatggcattggttcccccaagcgccagaagagaacagccttttcataacggctgcggcatcggcatttacggtccggccattgatgaatacggcaacagcctgaccggcggcatgctgctgaaacatatcgcacaggagtgggagctcagtattttttaatcaaacgaaccaagaggtgattggatgcaggaattccttgaaaatgtaatcggctcggcaaatgattttttatggtcaaaactgttaatcgtactgcttctttctctgggactgttttttacgttcagatcaaagggtctgcaagtccgcatgctgaaggaaatgatccgggttttgaaggaaggcgcggccgcccggacaaaaaacaccatttccccgtttcaggcattttgcatcagtatggcggcgcgtgtcggaaccgggaatattaccggaatcgccattgcgatcgcactcggcggtccgggcgctattttctggatgtggattatcgcagtcatcggttcggcttcaagctttgttgaaagcacgctggcccaaatttataaagtaaaagatcaaaacggattccgcggaggcccggcctattacatggaaaagggcctgaagaaacgctggatgggcgcgctgttcgccgtattaatcacactgtcattcggggttgtttttaattccgttcaatccaatacgatcagcgtcgcctttcaaaacgcattcggcaccagccggcttacattgggcattattttaatcgtggttttcggcggcgtaatcttcggcggcgtcaaacgaattgcgaaaatggcggaatacatcgtagtcgtcttggccgttttatatatcggtgtcgctttctttgtcattctgacgaacatcacccaattgcccggcgttctgtcgctaatcgtaaaaaatgcgttcggcattgatcaggcagcgggcggcgctttaggtgcggccttgatgcaaggtgtaagacgcgggattttctcaaatgaagcgggtatgggaagcgctccgaacgcggcggcgacagctacgacgagccacccggtgaaacaggggctcattcaggcattcggcgtcctgacggatacgctcgtcatttgtacaagcacggcgcttatcattttattttcagacgcgtatcaccagccgggactgagcggcatcgcgctttctcaggccgccttgagcgatcatgtcggcgcatgggcgtcaggtttccttgccgtcttaatgcttttgttcggcttcagcgctctgatgggcaactattattacggagaaaccaatatcggatttttaagccagaacaaaaaatggctgttcatttaccgcatctgcgtgctcggaatggtactgttcggctgtatttccaaagtccagcttgtgtgggatatggctgacttgttcatgggcttaatggtggtcgtgaacttaatcgcgattttccttctgtcgaaaaaagcgtttgccgctttgagcgattatgtccggcaaaagaaagccggaaaggaccccgtcttttacagagatgtactccctgatgatgacgggatcgactgctgggagtattcagacatcgcgaaaagtgcgaaaggcaaacacatttcctaaacaaaaggtgttcgggcagcgtcctgaacaccttttttctgccggttcattgacaaagagaatagcgtccattaccctttttatatattttcagtaaagtcagaaaggaaggcctatgaatcccattacacaaatattaaatgaatacccggttatgatcatagacggcgcgatggcaaccgagcttgagcggatgggctgtgatttacatgatgatctgtggtcggccaaaattcttttggagagaccagaactgatcaaacaggtgcatgcagaatattttgccgccggcgctgattgcgcgatcaccgccagttatcaatcgacaatcgaaggatttgcagcgcgcggcatcccggaaaccgatgcgatacgtctcattcagacatctgttgaacttgccgcacaagcacgcgatgaattttgggcgcatgaagaaaaccgtttacaccggcccaaacctttggtcgccgcttctatcgggccttacggcgcgagcctcgctgacggctcagaatatcgcgggcattacggactgacggaggatgagctgatcagctttcaccgcccccggatgaaagccctcatagaatccggcgccgatcttttggcctgtgagaccattccgtgcctgtcagaagcaaaagcgatcacaaggctgctggaggaattccccggcacttatgcatggatcagcttcagcgccaaagacgggcggcatatcagcgaaggcacgcctatttccgaatgcgcggccctgcttgactcctgcagccaaatcgcagcgatcggcatcaactgcacaccgatcgaacatattccgccgctgatagaagaaatcaaacgggcagcatccaaaccgattatcgcctatccgaactccggtgaacaatatgacccggtgacaaaaacctggaaaggcgcagcgtgcgaaaaccatttcggaaaaagcgcgcaaagctggtacgaaaacggcgtgagcctgatcggaggctgctgccggacgaaacccgcggacatccaagccattgccgattgggccaagaccttaaaaacaacttgactaatcggaatagtttgtatattctattcaaaaagccggttcgccggaatctcgtgccgttcgccggcatgagattttttattagaacggctctcgcagaaagttggaaaacaatgaacaacaagaacgagacgaattttcagagaagtatgaaaagcagacacctctttatgctatcactcggaggtgtgatcggaacggggctgtttttaagctctgggtataccattcatcaggcgggtccggcgggcaccattttcgcttaccttttgggcgcgggcatcgtctatcttgtcatgctttgcctcggtgaactgtcagtggccatgccggtgacgggcgcattccacacctatgcgaagacctatatcgggcccgcgacgggctttacggtcgcatggctgtactggctgacgtgggcggtggcgctgggctctgaattcacggcggccgggcttttcatgcagcgctggttcccgcatacttcagtttggatgtggagtgcggtattcgctcttttcatctttttattaaacgccttctccgtgaaattttttgctgaatcggagttttggttctcaagcattaaagtcttagccatcttactgtttattttattgggcggagcggcgatgttcggcatcgtcccgatgaaaagcggtgaggccgcacctatgctgtcgaactttacggatggcggcagcctttttccaaatggctttttcccgatactgatgacgatgctttcagtaaacttcgctttttcagggacggaattgatcggaatcgccgcaggggaaagcgccgatccggaaaaaaccgttccgcgcgccattaagactacagtctggcggctggcgcttttctttatcggaacgatttttgtgctgtcagggatgatctccatcaaggaagccggtgtgattgaaagcccgttcgtcacggtatttgacagagtcggcgtgccttatgcggccgatctgatgaatttcgtcattttaacggcgcttctgtctgcggccaattcagggctgtacgcgtcatcacgcatgctgtggtccctgtctaaagaaggggagcttcatcccgcctttgccaggctgacctctaaaggcattccttttaacgctctgatcttcagtatgatcggcggcattctgtcgttgttgtcaagcgtatttgcagcggatacagtctatcttgttctcgtctccgtctcaggatttgcggtagtggctgtgtggatgagcatcgccgcatcgcaatttttgttccgaagacggtttcttacagaagggcaccagctttcagacttgaaatacaggacgccgggatatccggccgtaccgatagcggcctttctcctatgcctcgcctcctgtatcggcatcgcttttgatccgaaccaggccatcgccctttattgcggaattgcatttatggccgtttgctacaccgcttattacttgaaaaaccggaaaagcagagcccgcgtgcaagccgtaaaatcccaataaccaaaaaaagaaccctgcagcgcaagggttcttttttcatttatacttcaaccacccatctgaacgaatcccgcaccttcccgacttggatgccggcaatcgtttcatagagcctttctgacacttcaccgatcaaaccgttattcagttcaatcgttgctccgtgaatgtgcagcgcgccgaccggcgagatgacggccgcggttcctgtaccgaatacctctgacacctcgcctctcatcgcagcctcatagatgtcatcaatggcgacctgttcttccctgacgcggatgccccagctttttaacagctctatcacagatgcgcgtgtgatgcccccgagaatgcttccgtttaacgccggcgttacggcctctccgtttatgatgaaaaagatattcatactccctacctcttcggcatatttcttttccaccccatcgagccaaagcacctgatcataccccagttcttcggctttccgctgagcctgtaagctggccgcataatttccggacgttttgacgtcgcccactccgccggtgacggcacgcacatactcatcctccacataaatccggatcggtttcagctgatcgccgtaatacgaaccgacaggcgtcagaacaaccatgaacttgtaacgctttgacggccggacgcctaaagaaggctcagtcgcaattacaaacggacggatatataaagaggttcctttttctatcggtatccattcctgctccagctccaccaattgtatcaatgcctccagcgccagcttctcgtcaagaggcggcatgctcatccgccgtaacgatttattcagccgttttatattttggtcaggacggaacatcaacacccgtccgtcttctgacctgtaagccttcagcccttcaaatacggcctgcccgtaatggaaaaccgatgcggaagggtcaaggcggaccggttcataaggggtgattctcggatcatgccaccctctctcctcttcgtaatccatgacaaacatgtaatcagtgaagtacttgccaaaccccaatgaagcggagtccggtttttcttttcttgctgtgaccttacgtctttcaatcagttgattcaacaaaagcacacctttcttttaattgttcaaattttcagtcttttataagctgcctgttttctctgcctgaatcgtgtatgcacagatatatgaggatgcagttgaccgtatcatatcaaatataccacttataagaggataattatcaaaatttttgatattttcaagcgaaaatctaactttattttattctgcttgatttttttcaatgaggactttctgtcatattaaatgattgcgcttacataatgtaaagcaatcctttctttcgcacagtcaataatgtgacaaatttatggcgaataggaaggtggttgccgcctgcttcacgaattacgtatgaaatgcgcaagtaaaagggggattcgcttgaaaaaatttatcgcattccagattttgatcgctttagccatcggagcattgatcggccacttcttcccggatttcgggatggcgctgcggcccgtcggagacggatttatccgcctgattaaaatgattgtcgtgccgatcgtgttttcgaccattgttatcggagccgccggcagcggcagtatgaaaaagatgggcagtctcggcatcaaaacgattatttggtttgaagtgattacgacgcttgttctggcgctcggtctgttattggcgaacgtgctgaagccgggagtcggacttaacctctctcatcttgctaaaaaagatattcacgagctttccggctatacggaaaaagtagtcgacctgaaacaaatgcttcttgatattatccccgttaacatcattgacgtcatggcgaaaaacgatcttctcgccgtcatttttttcgcgattttattcggtgttgccgcagccggcatcggcaaagcctccgcacctgtcatgagtttcttcgaatccacggcaaatattatgttcaagctgacgcaaatggtaatggtcaccgctccgatcggcgttctcgccctgatggccgcctctgtcgggcaattcggaatcgcgcttttgcttccgatgctgaagctgatcggcactgtgttcctcgggctgttcctgatactcttcgttctgtttccgatcgtggggcttatctttaaaatcaaatactttgaagtgctgaaaatgatttgggatctgtttttgatcgctttctccacgacaagcacagaaaccattctgcctcagctgatggatcggatggagaaatacggctgtccgaagcgggtcgtctcctttgtggttccgtcaggtttatcgctgaactgtgacggctcaagcctctatttatcggtgtcctgtatttttctggcgcaggcgtttcatgtggagatgccgctttctcagcagcttctgatgatgcttgtgctcgtcatgacaagcaaaggcattgccgccgtcccgtcaggctcactcgtcgtgcttctggcgacagcgaatgccgtcggtctccccgcggaaggcgtcgccatcattgccggtgtcgaccgcgtcatggacatggcgagaaccggcgttaacgtgcccggccatgcggtcgcctgcatcgtcgtgtccaagtgggaaaaagcattcaaatataaaggacccgtcacggcagaccagaccgcccggacagaaagtatgtaaacacaaaaaagaccaccttattggtggtcttttctattaatcaatcgccgcatgatcctcttgttcaatcaaagcaaggcgttcattgatttcttcctgagtcatttcgtgctctttcacatacatgttgcgttcgttcgtacggcattcgtgactgcagctgcgcatgtatttgtattcattctcaggtgtgcagatcatttttttattacatgccggatttgcgcagttcacataacgctcgcacggctcgcccgtgaaataatcttttccgatgataacgtgctctacacggttgaccggtacgctgattctttcgtcaaacacgtagcactgtccgtcccacagttgccctttcacttcaggatctttaccgtaagtgacgataccgccgtcaagctgggacacgtcttcaaagcccttcttcagcagccagccggaaaatttttcacagcgtacgccgcctgtgcagtacgtgaggatttttttgccttcaagcatgtctttatgctcttcaatccagtccggcagctcacggaacgcctcaatatcaggtctgaccgctccgcggaaatgaccgaggtcatactcatagtcgtttctggcgtcgatcacgatcgtgtcaggatcctgcatttgctcataaaagtctttcggtttcaaatgcttgcccgtcgtgacattcggatcaacatcatcttcgagacgaagcgtcaccaattcttttttatggcgcacaaacattttgcggaatgcatgtccgtcagcctcgtcaattttgatcggcatgtcggcaaagcgcggatcagctttcagtgcattcatgtattgatccgtctgttcaaccgttccggacaccgtaccgttaatgccttcctcagaaatcaaaatacggcctaacagaccgagctccttacaaaacttcaaatgctgagccgtgaactcctcaggctcatcaatctttacatatttataataaagtaaaactctatattgtttttccatgatttatacaccctgttcaattatattaatgatcgcacactctactatatcatacaggaaaacgggcgaaagatgaacatttccgtccgtactctttcttccagtcacgcttcgccttttaaaacctgctgaaaataaaaccgatacgtattgcgcaaaaaggtctcaagcgaaaggccggccgcggtctgatacttgccgataataaacggaaaacggtcacggccttttgcccgcaaaagatcggcgctgtcttcagccagttctgagatgagcgcctcaacgacaggccggcatgcgtcccgcacggcttcaagaatttgctgatcccctgtatgctggtactgttctatcagctttgccaaatccttttcttccataatgttcacttccttacaccatataaaaaagaggagcagcttttataaagcggacgcctcctcctgtgactccgcataaccgatgatctgaccgacctgtaattcacggccttcagtcaggttatccgaaggggtaaacatatctttctcgaatactaaaataacggtcgatccaaatgaaaaatagcccagctcttcccccgtctcaagcctgtttccggtgtttgtctgaacgatcgagttaatattcatcgcacctaccggaatcatgagcatctgctggtcagcacgggtcagctcgtacacataacggtaattttttgagagcacgtctttcccgtactttaaccccatcgtattaacgggataggagcgtttccccagctcggccagcttctgatacgtgcagctgacaggagaatggaagcggtggtaatgtctcgggctcaggtaaagcacggcaaaacacccgccgttatacttgtgatcggcgcttttaaaccccgtcagttcggcgaacgaataatccttcccttttaccatgaaagtttgattgggtttaatcatgccaaccgtctgaacgacaccgtccaccgggctgacgatggcgttcttctcttttgccacggggcggagatttaaattaatatcacgaatgaaaaatgacgccaatgaatcaaagtcagaagccgtgcgttccgtttcattccagttgatgcgatagtgtttggaaaacagcggaatcatcggcttgctcagtttcgattcacagaagtttttaatgagataagacgtcaatcgattattagtcagttcaatcaatgaacggtaaagaactttagcggcagtattaaacattgattactcctatgaattttcctatagtaataaaaataaaacaccataaaaacgctccgatggcggcgaagcataagtaggttttgaattccattctgccgattccggaaaagtagcaggtcacgtgtctgatgccggggatgaaataacctaaaataatggtgtacggcccgtacttcttcatccacctgtctactttctccatcctcttttccttcaggccgacccatttcccgaacttattaataaacggccggccggcttttctgccgatgaagtagctgataatcatcccaaggagcgctccgataaagctgatcagaatggagagcccgtaattcagcacgtttaaatgagcgaagtagcccacaagcgtcatcatgacttcatccggaataggcaatccgataataccgagtgtcagcataagaaaaatcgcgatatatccgtaatcggatattaattgctgaactaattccatcttctgctctccaggttttcaggcgcctgttttttaaagtgcggaaatttaatgttgctgaccattaaataaccgagcgcgatcgttcccgcccccagaagaaaagcgttattgataaagctcaaaatgacaagacacatacccgcaaacggaatcggcatcccgataaacgtcggcagcttgctttgttcaatattaaatctcgaaagacggatcatcccgcagatgctgtaggaaagcgcgattaaaattccgatgaacggaatcgtatatagtgaaacactgtaagcgagcatggacggcgctacgccgaacgtcacgagatcagcaaaagagtcaagctcccttcccatctccgataccgcgttcagcttacgggcggccaaaccatcaaagaaatcaagaaacatcccggtgaaaataaagatcaccgcagagtgtatattatgatacaaaagggaatgaatcgataagagcccgcaaataaaatttccaattgtaatcatactaggtatataattcacagtttacacaaacctccaattaaaaccatatcaaatcggactgcgtatgcataaaggctccattttacggaaacataaaatgaaattctttcaatgctatcattcaaattcttttattatacagcatttggtgttatttgaacaatctaatctggtgatttttgttttttcgccgttcatattaaggtaagcaatcatggattcctctattccggattaccctgcttcaatattccatgccgcgatccggattgtccgttcttgatgaatgaaaagccgtatgatgtattgttatttccttctccgtgaaatgagaacattacatataacgattgcggacataaaaagtttcatgaattaaaaagccggcacaaaacggcctcatacattatctcacaaccccgttttccagtatatagtctgccaaacaaaaaaggcgccttaccattacggtaaaaacgccttttaagatcattttatgtaattgataaatgactgagtgcttcggccgctctttctctggcttcttcaacggtctcagctgcagaaagcgcaaccgccatacggcgtccaactttcgtgacgggtttaccgaatacgcggacctgagtgctttttacccccaaagccttctccaaaccttcaaccgcataatcagcaagctcttttggcgccttcagcggacggcttgcccccggcgacagctgagtgatttccggaatcgggaatcccaataccgcgcggacatgcagcgcaaactctgacaaattttgcgttacaagcgtaacgagccccgtatcatgcggacggggagacacctcgctgaaatatactttatcttcagtaaggaaaagctccacaccgaacaaaccgtatccgccgagctcgtccgttatgcttttcgcaatgtgtttcgcctctttgatctgctgttccgtcatatgatgaggctgccatgattcaatatagtcaccgtctttttgttcatgtccgatcggcgcgcaaaaggacgtaccgttcgccgcgcgcactgtcaaaagagtgatttctgactcaaatggaatgaattcctcaacgatgacccggccgtttttcacccggccgccttccatcgccatgtcccagcagcttttcagcccggaagccgagcggcacacgctttgcccttttccggaagagctcatcagcggttttaccacgcacggaaagccgattgtttccgccgcttctttaaattcttcatatgtattcgcgaattcatagccggcagtcggaagatgaagcgtctctgccgcaagccgtctgatgccttcacggtccatcgtcagctttgccgcacgcgcattcggaatgacgtgaaaaccttcttcctcaagcttcagcagctcatccgtcgcaatggcttccacttccggcacgatcaagtccggtttttctttctcaatgacttctctgacctgcgctttatcaagcatatcaatcacatagcttttgtgcgcggcctgcatggcgggagcatgctcatagctgtcaacggctacagtgacaaccccgagccgctgcgcttcaatgacgacttctttccccagctcgcctgatcctaataacaacatcttcttcgcctgatacatgtcctttggccctccctttctataccccactcattataacggaaatattcaaaaaataaagacaagatagataacaagctctatcctgtcttttgcgctgattcgagcgattcaatcgcagctgacacgtccttctcgcgatattgccccattaagcataacgattcttccgcccggcaggcgtgagaagcaatgcggcgcttggcttcctcatggttgtcaaggatgccgagatcacagagactgacggggaaaccgagccggcggtaaaacggaagcagctcttcaatctcaggtcttcgattctcaagcgcgagctgcaccaatatgccgtaagcaaccttctggccatgcagcacctgatgtgtctcctgaagaaaactgagtccgttgtggaccgcatgcgcccctgccatcctgcacaaacggccgccatacccgccgaccgtccccgcaagcataatgatcgtttccgccgtatggatgaacggcacggacagctcgcctttctccatgcttccgacggccgcttcactgtaacgcaataacagattacggatatattccgcctgtctcagccccgcctgcgccatcagcggcgccgcctcctccgtatttctgatgaccgcctcggcctcataccatttcgccagcgtatcaccgatcccgcttttcatatattcaatgggagaggaaagcaaaaacagcggatcaacaagcgtcaaatagcttgaacgcttatgataatcaactctgataaaattgccgctctcatcatatatgacactcaacggcgtacttgccgcacacgtccccgcaatggaaggaaccatcacagcttcaatatcaagccggtctgccgccgcttttgccaaatccaaaatcgtgccgcctccgataccgatgatcacatccgcgtctgccgcctgctcacagaccttacgcaccgcctcaggtgaacagtatcctttatgctgaatcacatcccaggaagaaccgccgctgtaatcggagaacgcctgataggatttgattccggtcacaataacgggttttctgaatgtctccagcagccccggaagttcttttgcgattccttccttgcatatgtactgattcgggccgcttcggacgatatcttcaggcttcattcgaatctctcctttggctggaatttatatatattttcccacttgtcagaaaatacatcaaccggaggtgcgtcagcgcttcgcttcttccgcctccaaaaacagctcatcaagccgctccaaagcttctgccttttcaaaactgctgaaccacagatcatcataggaatcaaggatgcggtaatggtgggaaatcaaatgctgctgcaagcggaactcgccttttttctcgatggctttccaccacaccttgccgcccatcgtcttccccttcggcctgtcaattgtgcggtgagcaaccgtttcaatgacttccagcggatcatctcctaatacggattgcagtgtttcacttgatctgaaaagcgcgcaaaccgccacaacgtgcggccattccgcaagcgcccgccctttctcaatctgcaccagcgactttttagaaaggccgatcacatccgccattttctcctgtgtgtagcctctctccgaccggattttcttcagctggactgagacaagctcagtcatataatcttgatccatctcaacctccatatttatcaatatagccattttacaccgcggcacgccttttttatatcagaacattttcaaacgaatcaaaagaacccgggattggcttatcattgaagcgatgtacctttccgcataatccagaatgatgcggtgaaatacaaacgtacgcccgaagagacaggtgcaggctccctggcggttgagctccggacaaaataaaaagctgccgcagctgcagcagctaaaactttatagaccggaagatcagcattatgaagcgaatacaatccatcttgcactataattgacacgttttttcgaaccctgattgaccattttaaatctgtatgaatcccctttttttaacgaaggtgtttcaaaataagtcgtaccatttttctttgcattggcggttttgattgttttccaggcacctttgccgttgacttgcttttggacgtatattttatacgtgcccttccctttactgttggatttaaaagtcacggctctcaaggtgtacttttttgtcgttttagtgaatttagggtgatatgtattgatcacatagttagtgaaatacccgcttttataagtatgaagccagtctttagcctctgctttttgcggagaagaaaaacccataaaaccaattccgctgattaaaagagtaaaaataatgatgagcgacttaaaaatctttttgcttttcatcgagaaaatccttccttcctgtaactatttaccctatttatgttaatgacaatatagccaatcataaatccgtccaactaaccattttgaccgcaggaagagatgtgaacagcccttaaaatgactatatgactactacttatgattcttgtcatttttgattaagtgataaagttactttaaaccgctattcattttgttgtttttgtatcaattgtcatagcgaggtcttttcctatcaatgcctctctttcggcgtttgttctgctgccgtgatggggctctccttggataaacccctgcacccatgacaaactgtcatacgtttgccacctatgaatgaacgcacaatacacataatggagggattgcaatggacgaaatggtcctggaaacacaacaatggctgaatgagacgtacaaaggcagacacgggtacaacaaagtgccggaaaacggaaaaacgggctgggataccatttacggtctgacacgggcgcttcaaattgagcttggtatttcagaacctgccgataacttcggaccgacgacacaaagattgtttaagccgttgaaaaagcaggctcccgattctaagccgacaaacatgaattacattctgcaaggggcgctgtggtgtaaaggttttaaccccggcggattttcaggcgttttctatgaaaataccgaaagcgctgtaaaagagtttcaaaaagcggccgggctcactaagcaagacggcatcgtcacggcactcattatgaaagccttgctggatatgagcgcttttcgattagtagcgggaggcgacaaaagaatccgccaaatccagcagaacctgaaccgggattacaatgactacatcggcttgatgccttgtgacggcttatatgcccgcgatacaaacaaggctctcatttatgccctgcaaaaagaagaaggcatgagcacaagcgtcgccaatggatttttcggaaacgggacgaccagcttatgccctaccttgactcccggcgattcacggacaggctttgttttgattgtccaatacgcgctttactgtaatggggaagcgtttgatcccggtgaattcgacggaaaatacggcgtcggcgttgtatcggcagtgaaagctttccaaaagtttatgtgcctgccgcagaccggttatgcggacatgccgacgattaaagctttattatcaagctccggcgacacaacgcgggctgcttcagcttgtgacaccgctgccattttgacggcagatacggccaaaactttgcgtgagaatggctataagatcgtgggaagatatctgaccgggaatgtgcggacaagcagcggactgacatcgaaagcgttaacgtcaaaagaactttccacgattttcaatgccggcttaagcgtgtttccgatttatcaggacggcggctatgaatcttcttattttgtaaaagaccaaggaacgagagatgcgtacagcgctgcatcagccgcccgaagattaggttttccgtcaggaacgaccatttactttgcggtcgattttgatgcgtatgattatgaagtcacggataaaatcattccttacttccaagaaatcaagtcagcttttatgaaaatgcaggcgttctctactgcgccgaaatatgaaatcggggtatacggaccgagaaacatttgtatccggacgtcagaagcaggtctgaccaaatatagctttacggctaacatgtcgaccggattcagcggcaacctcggatacccgatgccgaaaaactgggcttttgatcaattttatgaagggacaatcggaagcggagcgggaaaagtcgccattgacaaagacggatactccggaaaagactcgggtgcaagcagcgtccatccgccttctgatcctgtgtatgatgcaagactgcgcacgctgacggatattttaacaaccattcctgctttagaaaatatatcgaatcttgcgaatgccatgtttgaattcgacaagacagaaaccatttatgcatcacctgaaatggatattcttttatctacttcacttttggcaacagttccaagcgaaggttctcccaacacagttaccattacaaatggcaaaccgggagcctatattaccggtctgatgggagattcacaagtctcttttacagcatcacaaattgattcctatcaaaacctgcttaacagtctgagcttgtcagtccgcaacggttatttagaagtgtatgtcaatccggctgcgggatcgctgaatattcaatttaaaatttatacacctgatattccggtcggtgacagtgctacaactggactaacaactaccattacatttaaaataaaacaaaagagcttcaggttgccggattccgaagaagtgtactctccggattgggattctgtcgtgaataccatggctattgcaggcgcaggaattattgttattgtagggatcggtgctttagtcgttttagcacctgaattaggaggagctgcagccttgttcagcacggttttatcactatttctataattgaacaggcagctccttgctccaggaatgctcaatgagtattcttggagttatttctaaaggaggattcgcatgaagattgatatgcagacatacaaggaaaccgttcaaaaaatagaaaccgatttgattccgcgaagtcaaaatgacgaagaactgcttacatacttaatgaaacaagattcgctcacactgaatcaaatgaaaatgtgtctcactgaaccgcccctcaccttccaacatactgtcaaaatcgtatgtacagtcacattcatcacgttatatatcttttttttcagcactcattttaatgatttgattgaaatggctctgcagatggttttcggcctggccggccttgtttggattattgctgtatttccgttttcaagaaaaatccaagtgtctgaccgtttcagacaaaaatctgaaaacacccgtatcaccggaatgatagactttgtcctcgaacaacgatacaaagacatgatcagttaaaacccctctgcttaaggggttttttattatgcaatcccttcaccccccttatcaaaaaaggctcttctcctttggaaataaccggaacacccaatttcgttttcaatataatgaggtagtggatccgcaaagaaagaagggcgacatgatgggtatcattaatggcaaaatgttcattgaccgattaaatcagcttggaaatgagatttggcttgatggtgaaaagatcgagggacagatttctgagcatcccgcatttaagggccttctggaaacgaagcgctctctttatgatttgcaaacgaaaccggatatgaaagatcaaatgacttacagtcttcccggtaaaaaagaacgggccgggctttcatacctgcagccgaaaacgaaagaagacgtaaaaagaagaagaaacatgttcgaacattgggccagacacacgcacggaatgatgggacgaagcccggattatatgaataccgtgctgatgagcttcgcctcctccgccgcgcttttgaaagaccgcgagcattgttttccggaacatgttcaagcgctgtacgaacgcgctgctgcacaggatctttcttttacgcacacgtttatcacccctcaggtgaatcgttcacaaatgggtgtaaacgtatcgccgacacctatctcggcaaaagtcgtcgataaaaatgaaaaaggcctcatcatacacggcgcccggattttagccacacaaggcggcctgacggatgaagtgctcgtggtttctctgcctaaaatgtattttgaatcggatgaagcgttcgctttttcaatcccttccaatacaaagggagtaaaattcatctgcagggaatctttcgtactcggcaaatcatcgtttgattatccgctcagctcaagatatgaagaaatggattctatcgttgtatttgatcacgttttggtcccttgggaacgcgtatttttttataataattacgaggcggcttttgattttaatatgaaaagctcttttaacgccttcgcatttcatcaagtcatcacgagacaaattgtaaagacggagtttctcctgggcctcgcccaaacgcttgtcgaagcgatagatgtgggcgaatatcagcatattcaggctaagatggctgaaatcatcaccggtctggaaacgatgaaagcccttttggaaaagtcggagaatgatgcggaaacagatgaatggggttatatgcgtccgagtgtcactccgcttcgtgtggtcagcgcgatttttcccgacatctacccgcgcttcacggaaatcattcagctgatcggggcaagcggaatggtgactttgccgactgaaaaagcgttccgttctgacatcagaggagaccttgaccaatatttgcaggcggccgaattgaacgctgaggaccgggtaaaagtgttccgcctcgcatgggatttgaccatgagccccttcggaacaagacagacacaatatgagcggtacttcttcggtgaccccgtccgcttaaccagccatctgtacagaagctatccaaaagaagaacagaccgcggtcatcaaggaattcctgcacattcataaataaaacaaagcagagagcgcatctctgcttatgatagctggatcggctgccgccgatcctattttttattttggctgatcaccaccatcgtaatatgcgataacgcgaaagagacaagcgtatacacaacggcccacccgataaacgagaaattcaatacggtaaaggtgcatataaggcaaacggccaaagcggcagccggcataatgaacgcgtttttaaacaggtacgttccggcgactgacaagatgatgatacaaagcggcagaacaccgaacgcaaaatccaattcatcaatcaacagatgcactcccttcgcttttcttagtccggcctaacacatcttatgcctgagtacaaaatcgagtacttcaaatctttcgcgctccggctgattttccctccggttatttattcaaaaaaatgaaaactttccttaaagcgtttacattcacgtcagactgtgataatttaagaaagcgctatcatacacaagttaatgatttttggatggagatgaggagaaccaggaaaccccgccctttcacaagggtgatttctggttctttttgtcattttcaaggaaaggagtcatacatacatcatgatagacgttcagcaaaggggaggatatgatgtttcaattgtttaagccggctccgcatattgagagattggatgattcaaagacggatgcggcctataaacggctcaggctgcaagtatttttggggattttcatcgggtatgccgggtattatttgcttcgcaaaaactttgccttcgctattccttattttcaggaacaagggttttcaaaaggggaacttggcttggtgcttgcggccgtatcaatcgcttacggcttcagtaaatttattatggggatggtgtctgaccgctgcaacccgagatatttccttgcgacaggtctgtttttgtcaggtgtcgtaaacattttatttgtttccatgccgtgggtcacgtcaagcgtgacgattatgtttatttttatgtttattaacggatggtttcaaggaatgggctggccgccttgcggacggacgatggctcattggttttccatcagtgaacgcggaacgaaaatgtcgatatggaatgtcgcccataacataggcggaggtattctcgccccgctcgtgactctcggcatcgccatgtttgttacttggaaaagcgtgtttttctttccggcgattatcgccatcgtcatttcatttgtgattgttcttctcgttcgggacacgccgcaatcctgcgggcttccgccgattgaagaataccggaatgactatccgaagcatgcgttcaaagaccaggaaaaagagatgacgaccaaagaaattcttttcaaatacgtgctgaataataagtttctgtggtatatcgcatttgccaatgtctttgtttatttcgtgcggtacggtgtcgttgactgggcgccgacttatttgacggaagcgaaagggttctctcctgaagattccagatggtcttatttcctttatgaatatgcgggaattccgggaacgattttgtgcggctggatcagcgaccggtttttcaaaagccgccgcgcgccggcaggcgtactgttcatggccggcgtatttatcgctgtattggtctactggcttaaccctgccggtcatccgctcatcgataatatcgcgctgatcagcattgggttcttaatctatggacctgtcatgctgatcgggcttcaggccattgaccttgcgcctaaaaaagcggcgggaacggcagccggcttaaccgggtttttcggctacatcggaggctctgctttcgccaacgccatcatgggttatgtcgtagaccgctttgactggaacggcggctttatcatgcttatctcctcatgcgtgctgtccatcgtcttcttggctatgacgtggaatacgggcaagcgggcggagcatgtgtaagaaaacaacataaaagattaatatttttgcagtacagcatttacaacgattttctacactagagacagatattgatttttaagggggaagaaaacatgcggaaacataaattgtttgctttggtattgctttcattcggtttattgtcattcatcgtcacgcctgtatcagcggcaggaaaaggaaacctcttgtctcctgacagaattttgaccattgcccatcgcggtgcttcgggatatgtcccggagcacacgatcctttcttatgaaactgcgcaaaaaatgaaggctgactatattgagctggatttacaaatgacaaaagacggcaagctgatcgtcatgcatgatgaaaaactggaccgcaccacaaacggacaaggctgggtgaaggatcatacattagccgagattcaaaagctcgacgccggctcttggttcaataaggcctatccggaaaaagcaaaaccgcaatacgccggacttcgcgttcccacacttgatgacgtgttaaaacggttcggcagacatgcaaactattatattgaaacaaaggcgcccgaaacatatccgggtatggaagaaaaactgatcgcttcactgaaaaaatacaaattggcaggtaagcatgcgaaacttggacaagttatcattcagtctttcagcagggacagccttctgaaaatcaaacagctcgatccgaaacttcccgctgtccaattgcttgaagcggaacagatgacgtcaatgactgacgcagatttaacggacattaaaacatatgccgtcggtatcggaccggattacaaagcgctgaacgctcaaaatgtccgaaacattcgcagccacggccttctgcttcatccttacaccgtaaacagcgaggcggacatgcgccgtctgctgaattggggcgtaaccggtgtgtttaccaactatgcggatatattccaaaaggttaaaaaagaatacaaatcataaagccacatgggttcggagatgatgccgagcccatgttttttgcccgataatgcaaacgccatcatgggttatgtagcgggcggagcatatattaaagcttacattcacctttatattaattaaaggtatcactgtaattgtgaattacctatgataccttacaaacaaaaggatataattatttatttctattatctattttctttcttatactatttgtaatagacgataatacaagtgatactaaaccatagacaaccacccatccccaaaaggatagattaaaaacagtaaacattagtatgacagaaacaactatactgacaagcggcattatatacacttttttgaaaatataagtgaatataatcgataagacgataatagaaagtggtaaaataccaaaagcaatatctagctcatccattattattctcctttgtgaatttaatttctccctttaaatatactcactcagctatctagcgatttaaaaaatgtatctatccactccatacttctttgtttttcttaatcataaaaaagtcatattcagaaacatgggtattgttaataattttttcaagtcctctgataggagtagattttaatttttttccgtttttataagagtaagaattaatcacatatttcccacccttgcttatttctaacaagaaaattttagattcgtcaaaataagtgaattttgcttggttttcaaattttgtcgacctatttaacggaatttttttcccggcttcatacttttcaaatcgaaagtataaagtattgaattagctgccaaatgatataaagtgtcatttttcacaaaaaagttattagtggaaagaggaattgccagttgagaaatttcatcagggatattataactgcctaaaggatatgcccctttaaactttttatgctctaaatcaatttctgctactttgaattgtactttgtttgatttatccgtttggttatatagtataaaaaaggctgagctttttttaactattatttgtgaataaacactccaattttcttcatttaatataggaattgttgttcctttccctactgtaactttatctttatctattttaataccctgaaaagtcggtgttttgattgaagaatcttcatttatcacgtaaatatattcaccgtcattaccagtacttgtatagaaacccggaataatcttttcatgaaatccactgccgttaccccatctaattaaactattataatggttttcaccgactccttgattattcaaaaaataaaagatattttcttttattaaatggcctgatgattgcccataacttgtatgtacttgatgctgcatcgggaattttttaaagttatcacctatcatataaacttcttttttgtcctgtctaactatgtttttttcatcttgtgcaatggttccaacctcaatagcatctccttttacagctgttgctgctcctttttcatcaatgtatacagtacaactcccatctttaggataatctattgtagctgaataatatatagctgcaattttatcattcaagaaatacttttccttttctttttcagtttgtttaacgtcagaaactgaattagtatatttaaaagttccaatacatataaatatacctattaatactatgaccgcaattataataagccacttaatcttgttcaaatataatctctctccttaaaataatatgactccctaaataaacttagggagtgaaaataattcatctaaatgttttaatagtttttgtataattggaatctctgatgtctcttggatagacgcccatgcctttatctttatccatatctataccagcctttagcttaaaagctgaccataatagttttgaacagtttttatcaccataatgactcgattttctatttgttgcaaaattatatgaataaccatccttcccaaccctgctataaccccaatttactgaattattttttttagaactagaaactttcacattttgaattacagcgtttttttcgaccttacgtttcgatgaagctattgcacgaacaccttttttagggaccgattcgacaatttgatttcccttatagtacataccgacatgtccatgcggaagcccaaaagtagatgcaggtgtatagtaaacattacctttagagcttgatcctataattttcggcccgctattcttgcccattgtgctcattctattacttttatcttcttctttatctagcttttcttgcttctttaattcagttttaatttcctctaagatctcattagatgttttattatcttgtttaactagatcattaacggattcaattaatttttttttcgacagattcggattcattttcaatatgtagtttactgtttctgaattatacgagtccacagccttaacacaaaatactaagggagtaacgatgcataatattgcaaaaaatttctgcattttcatacttattacctccaaccatttgtttattctcctatattttaatttattatacaattattgtaatcacaacttacgtactgtattttctctatggttaattatttgttttgtcgctaaaactttgacttgaagtacaggaaaacggatgaagttacggagaagaaagaagttgcccaacatatcttttacattcattgtttaatatggaagacagttattgataaggcggagaaatcatgagaaaaaaagaatactgtccttggttgcctgtcgttaggctttctcattcatcgtcacgtctgtatcgaacccatgttttttgcccgatcaaaaaaccttgcgggaacgttaccgcaaggtttttattaatcattactcttttccggcagcggcttccgcctgtccgccttttaattgatcgttgattgctttggcgtctttcaaatactcagtcttgaatccgctcttcagggcccacgcatagaaggcaagggcaacgattgcgatcagccccatatcccagccgtacggaatgatgttcagaccgccgaatttttcacttccgagccatgaaatgaccatcatgctgagcagatagacaaccatccagacgccgcctttaaagtttctgcggaatcctttccacttcgctttcgcttggtagtagaaataaatcggaaggccgatcaaaatgataaacagcacctgccctgttaacggccagcgcgcccaatacagcacgagagacgcgaacacgaagccgagcggtgcaaccacgctgaggcctttcagacggagaggccggtacaaatccgccgccgtccgccgcagcgtcatcaccgtcacgggacccgtgatataagaaatcagcgtcgcaacggaaatgatttcagcaagcacgccccatcctctgaataaaaacagaaagataaacgatacgaccaggttgaaaatcatcgcttggcgcggcacgccgtacagcggatgaagctttccgaaaatgctcggcatatatttatttttttccatgccgtaaatcatgcgtgacgtcgtagcggtataagtgatacccgttcctgacggagatacgaacgcatccgcataaagaataatgacaagccagttgatattcaatgcgatcgccaaatcggcaaatggagagttgaagttcaggtgactccagccgtgaacgatcatggaaggttcaaccgcaccgataaatgcgatttgcaataggacgtaaatgacggttgcgaccagcagcgaaccgacaaccgcaatcggaatcgatttgccgggattttttgcttctccggccatattaatcgggctttgaaacccgttaaacgcaaatacgatacctgatgtggccaccgccgtcagcacgctcgcccagccgttcggcgcaatgcttgaaccggatgtgaagtttccgccgtgaaaaccggtaaacagcagcgctccgattgtcagccccggaataatgattttaaagatggtaatcaatgaattcgcttttgaaaataagttaactgtccaataattcagtaaaaagtaaataatcagtaatacggatgcgaagccgagcccctctcccgtaagagtgccgttgtgaacgagattgcttgtccattttgcccattcccacggccatgagctcatgtattgaacagacgcaaccgcttccaccggaataacggaaacaatcgcaatccagtttgcccatcctgcgataaatccaataaatgatccatgagaatattgagtatattttaccattcccccggcttccgggaacattgaacccaattcactgtaagaaagtgcgataaacaaaataacgatcataccgataatccaggaaataattgcggcaggtcccgcaatctgagccgcccgccacgccccgaataaccagccggagccaatcatcgacccaagtccgaccatcatgagtgcaaacgttcccattctgcgatgtaattgattcataaagttaacacctttcaattaaaatatgactccagcgctatcatatatttataatattattctgaaaatagttttgtcaatctttatcgcattaaagcagaaagccaaaattacccttccgatgtttaaacagccgttaagcgggaataactactgcaagccagaaatagaaaggagtttttatcgtgaaacaaaaactgctcatttcaggacttgccgtgtcgactgtcggagtgacttcctacctgctcaaagataaatccaaccgccaaaaggtgatgaactttatccgcaatatgaaaacatcgctctccgggaagcaggatattgaatcattccccgtcaacaaagcaggcaacccgcatcccgaagatattgaagataacaaaatggtatccgaaggctccatgtacccggttcaatattatgatgacaagaagaaatagtctgttcccgggctgcccggccgtatcaaacggcggcagctttttttatgcagacggcgtttgatagatccgccaatattggcgcgatcctttctcccgcacggtaatgcccagtttggatatttccgctttcagctctttcgcatcagccttttcctcctctttcagcgccttttctctcgctttaaaaagagcatttgcccctggctccaaatccggcgtgtccggcacccaccgtttgtattcttctttaaaaggatcttccgtccccagccagacatacccatgcgcgcgaaacgcatcagccgctttttcaaccgcgggctcaagcttctcccgaaaaagctcctgcccttcagtccccaataagacaagatgcttttcatccgtaaacacaccggaaatgctgtctttcgaaaacacgctttcttcattatatatggttaaggacacctcgctgtccgtcacgaccgccgtaagacattctttaaaaacagtccgcgtcagccacattcccccgattaagccgataacggcggttgcagccgcagccttccatccgtgaaaagaagcgatcatttccagcggcccgataacaggcagccaatccaatgttacggcccacttcgcaatgaccggcagaaaccatccgatgaccagccccaataatggcggcatcagaaaaaccaaagctttttcaaccgatgacaactcaagaaccgtctgtttttttatttcgttcatgtttctcctccgtctgtgtttttcacaactatccattatacaaagggttggatgattctgtaaactgtttccgaaacaataaaaagcctcccggccgccgggaggctttttaaaacaggagctcatatacttcattcaattccatcgtgcgcttctcatcctgctcgttctcagcatatttgatttccttttcaagcacctgattcagcgcatccatttccagatcatttagatctttcacaaactcgccctcatttgcataatgcttcacctgaagctttttataaatcccccggcacacatcatgctccaagtggttcgaaagcgactcgcgcaaatatccgagtgtcctgtccatcatgtaagccctcccttttctttaagaatagcttcccggaaagagagaaaaactatacatgaaagcaccgggcggctgttttaactctgtacctgaatggagaaaaacccgctgcttaacggagtgtacggcccgttcagccccgttgcggagaaagagaatgttcctgaactgacataagaaagaggaacactgtaatatttaatatagcctgtaacgatattgccgtttttcgtatattcatcttccagcgcttttgacgtaagatttgtaatattcgttccgttgttaaacgcctggatcgtgttattgttcggatacccttggaaatatacggctaaataacccgttgtacccttcatcggttttgatgcgctgatttggttcggcccgatattttcccattggtaactctgaccgtcagacgtcacaccgataatacggatttgtgttaaagcaggagccggcgccgcagacgctgatggagcccacaacccgctcacaagcaacaaaacagcggcggccgccgcgaatagcataacgagtctctttttcatgtttcttccccctcttattcttttcgtagaatcctatactattttacacgatttacaaggaaaaagattacattttataaaagagtccggaacactttgtgaactagatatgaaacgctcttgaaacgccgttgatcatgagaaagatgccgcagattcttaacacgactctcgaacttctgtcatctttaccgaaaaaggtttttccgagccgcccgatccatacgttcattgcaactcccgcgagcaattctatgattccgatcatttctgccatatacaaagcagccacccttctaaccgttttttttcatatgacggcttatcatataaagtgataagaccaatgacgctgcaccgacagcaagaaacaggctcagcggcacgatctgcatgctgcctccgccattgttttgaaatgcgccgatcgcccatttttcaggagtaaacaacgacagcatgcgcatgtactccggagccgcgtctaatgtgaagaaagcccctcccaataaacccgtgacagctataaaaacggaagcaagcgacgtgaattgcttttggctcttcatgaacggtatcacggccatcgttacagcagtcagcgcaaacgagcaggccgcaagcaccgctcccgcagcaaaaacatgatcagcaaaacggatatgcagcatgaatgttccggcagcgaggatcacgataatatggagaagtccgaaaagatacgccgccgcaaacttagagattgcatatgccgtataggaaacgggcgtgctcagcaatctgtcatatgtatgattttcttgttcatctataaatgatcgcaggctttggactgcaacgaaccagataaacatcactaaaaatccgataagtctgtcggctgcctgtccgccttcataaacgtgatggcggtcaacattgacggcggaatgaccctgaatatccttcaagagatcagctgccgcctgcttcccgtcggtgtgcagcgtgcgggatatcacttttgcatcgcggactatttttttcagctcgcccgcctgctgcgcaatcagctgctctgtcaaaacagcatcacccttttcttcattctgaataaatgaaacgttcaattcatctccggaaaataatgtctcttcaaaatgagagccgatcagcaatccaaaggatatatcctgatgatgaacctttgtttttaatacatcctccgtgaccttcgtgacttttatatggccggctttctgaatcattttcataaattgcgctgaataggcgctctgatcctcatcagctacatatacttccttctgctgactgccatccgcagaaaaggaaaagaaatatgtgagaaggagcggggcggaaatcgtcgcaaagatggcagcccgattttgcagcatcagtttcagctgatgtctgatcatgaataacagctgcgtcatgaaacagcctccttccgtttaaacacccagatggtcaaacataaaaacacggcgccgatggcggcaagctctgccaaatccgtcgaaataccgctcagaccggcatgctgcgtgacactgacatagctgttgatcgctttgccgttcggtatcagctcctgcacgattttcaaactgtcaggcaagccgtcttttgcgataaagcttccgcctaaaaaactgaatccgtataaaatgggagccgccatgcttgagacggtctcgtggttttttgcagtaaacccccaaagaagcacgatactgccgatcgcaaatgaataaacgatcgtaaccagcaatatttcaaacaaattgccccattttacctgatacaagatgctgcttgcgatgatgacggcagccatttgcataaggatggcaagcatgattcccaaaagcttacccgccacatactggatacgtaaaacaggcattgatttgattctgaataacgtgtgctgctgtctctcttccactatcccgtgaatgagcgcaaacgcggtcataatggagaacatgacgaccattgcgattgaataatactgcatcgcatcaatcggagccgcatgattgccggccgactgtttcggaatggtgacagcctgttcacgttcacccgaaaggccgctgatgattttgctggcatctccctttgacagatgtcccgacttcttcagcaccgctttttcttcaccgatctccgcttttactctggtgacaaacgaatcagccatcatttccacaatgtctccgtttacagagccttgttggtccgagatgactttgatacttgttttttcattgtgttctgccgcttttgcaaagcctttcggcacgtatacaaaaacggagactttgccgctttcgacaagctgtttcccttcttggaaactgcctatgtcttttacacggatgagatcagtttgtttcagcacgtcattctttaatacgtcgcccaaagaactctccgcgtgatccgcattataaaacgcggtctgaaacggcttcactttcgaatcgccgtgaaaaaccgttcctaaaataaaaatcatcagtgccggaaacagaatcagttttatatagaaagactttgctccggccaataaccgaaaatctaataagatcagcctgaataatattttcatgacgccccctatgaatcccgcagcgttttgccggtgagccggaggaaaatgctttccagattggcttcctcgaaatgaatgcctttaatggtgataccagttttcctgatatcatccgcaatatcaaggatattgcgatctgccgcagagacgagcatcgtaatggtctgctggctgacagcagcctcggcaacaccgggaatgcggcggatttttttaacggcgtcatcattcagcccctctgcattcacgatcagggtatcagaggctttggctgactgcttcaattcatctttcgtcccgcaggcaatgattgagccgtgatccatgatcgccgctttttcacagaggtattcgacctcttccatgtaatgactcgtgtagatgacggtcatccctttttcttgatttaacgtcttcacggtttcaagaatgtggtgtctggattgcggatcaattccgacggtcggttcatctaaaatgaatagtttcggttcattcattagcgcggccccgatattcacccgtcttttcatgccgcctgaaaactcagatatcctttgatttcgctgttcctgtaattcgatgatgtccagcacttcatcaacccgtttacaaagttccttaccggaaagtccgtacagactcccgaaaaaagccaaattatcctttgcgcttaacgcttgatataaagcgatttcctgcgggacgactcccatcactttttttatggccgcaggctgctcctgtaatgaggttccgtcaatgcagattgttccgcccgtcggcgggagcacggtgctgatcatcgacaccgttgttgatttaccggcgccgtttggtcccaggagaccgaatatctctcctttttcgacgcgcagtgatatatgattgacagcggtaaaatcgccgtacttctttgtcaaatccgttaattcgagcattcgtgcagcactccttgtgtcatgtctgcacttattctactcttggcgatccttgttttctattcactttcgtactcgatatgggtattactttcgtcatatgtttagtgataaaaagggagagaggagggtgaagcggggttatagcaatttttgcaaatataaggtaagctcggttctgtttgacacttcaagtttatcgaggattctggatacatagtttttcacagtgccttcagtcagaaataagtctgcggcaatgcgtttattgcttttgccttccataatgtgtttcgccacatcaagctctctcggcgtgagaatctccttcagctttgaccgcggctctttctgcaccgcagggatctccatattgttcagcgcttttacgacggaaaccgtgattttgggattcagcatcatcttgccttcataaacggcttgaagggaggcggtaatttcatctgaatcagcatccttcaagagatagccgtcggctccgcttttcagcccggcaaaaatatagtgatcatcttcaaacgttgtcagaatgatgacttttacggacggatatcgcgcttttaccgcttttgtcgtttcgattccgtccataccgggcattctgatatccatcaaaatcacatcggtttcggtttgagaaagcagccggagaacctcttcgccgcaagaagcctctcccgatatttgaattccttcatgaagactcagaatcattttcagcccctctctcacaatggactggtcgtctgcaatcatgacattcacttgattattcctccttgcatggaatccttattttcacgtcaaaacccattttcttcccagacgagaaaacagcctctccgccaagtgcggctgctcttttctcaattcctttcagaccatttgattttatgatcgttccgcaggctgagccgttattatgaatatgcgccaatatcatgtttcggtttttttgaatccggacagaaacatatgaagcatgcccatgttttatcgcattcgtaatcgtttcctgaacggattgataaagacattgcttcacatccggctgttccgcttctatggccgcgtccgtctccagctcgaagcgtatgcctcccgcctcttgaaaatggctgaaaatgtcacggagctcttgctcaaatccccgccccggcaaagagccctgcagcagcataacggcctggcgaagctttaaaatggattctttcgtaagatcatgcgccttatgaatgatctgcttcactttgtccggctgatgcccggctgtcttcccggcaaattccaaattcattttcagagcagccagataatgaccgagagaatcatgcagctcctgcgcaattctagttctttctttcgtaacggccagttcctcaatccggtctgaatattccttcagtgtgtcattagcgatcttcagctctcggttcagcaattcaaccttcgacttctcctgcaggtttttccgatataaataaatcaccgcaaacatgatgaagtatggcggcacgatatcactgacacccgctccgccggcgtataaagctgcggcaaatgcggcggcattcatcgttaacaaaacagccgaaatctgcttatcagtaataagcacctccgccaataaaagcaccattacggcctgtgcccccacactatagacattgtacaaaagaactcccgcgataacgctgctcaggagaaaagagacttgatatacagccggccttctcttcatatatagcggccgcaggcagtcattagccgtcagcataatcacgagcacagacaaaaaaaccttcagctccccccggccgggaggaagctgaagaatcgcatgaaagattgatagtaatgcaaaacccctgatcagtaacttcgtatgtgcaatcttcatcgaattctccttacaaatgagcggcggctttccgctccacgttcagcacatcatacagctcatcaagcgaatgaatttcatgcgtcgggatgatctcggactcatttgctttctttccgggattaaaccagcacgtatcaattcccgccatctgaccgccttttatgtccgcgctcagtgaatcgccgataataagtccgccctcggcagaaaaaccgggaattctcgcaaacacgtaatcaaagtattccttcatcggcttttgaaaacccgtgtcctcagatacaaacacatctttaaagaacggatacagaccggagtcgcccagccgcttatattgtgatcttgagacgccgttcgtcacgatgtataaatcaaataaaggactcagccgttcaatcagctcataagctccgtctatcatctggtgcccttcttctaagtattggcggtacgcctgattcatcagcacgccgtcggcttcgaggccgtattctttaaacaaaagggcaaaccgtgtattgaccacttcatcgcgggtcatttccccctcttcaaacgccttccacagcccttgatttaacgctttataacgggcttccacctctgccgtcagctccagctttgaaccttgaaacaatttttgaagagcatcggtttctgaagcggtaaaatccagcagcgtattgtctatatcaaataataacgtacggtaatgactcatcgatgtttcccccggttctgctttttttaaccagtataccactcgcggacaagccgaaaaagacacccctgtaagagagtgtctttttgaattatacagcgtcttctattttcgatttttcaccaggcatgcgcttgccgataccgaacgcataatagctgaccgtcacaatcgccaggaaaatcaccccgacaaccaacgaaatccgcgtatctttgttaaaccacatgccgatcaataccatgagtaagaaagcgatcgtcaaatagtttgtaaacggcgcaaaaggcattttaaacggatgcttatcaagctcagcgcccttcgctcttctgaaaccgagatggctgattaaaatgacgaaccacggaatcattcccggcagcacactcgcgctgtacacatagacaaaaattttcggaggcgcgatgtagttcagcacgacaccgatcacaagtccgattaatacggcaaacgtaccgaatatcggcacaccgctcgaagaaactttcttaaagaatttcggggcctgtccgttcacgcccaatgtataaagcatgcgtcccgcactgaatatcccgctgttgcatccggacatcgcagcggtaatcacaacaaagttaatcaaaccggccgccgccgtaatcccgactttcgcaaatgtcgaaacaaacggactgccgagtgagtgaagctcattccacggatatacggtaacgattacgaaaatcgcaccgatgtagaaaattaaaatccgccaaataatactctgaatcgcgcttcgcagcgttttttgcgggtccttcgcttcccctgccgtaatcccgatcagttcgaccccttgataggccgcaacgaccaaagacaaggcaaagaaaaatcctgaaaaaccattcgtaaagaaaccgccgtgcgaccataaattagataatccgatcgcatgccctccgttaccgaaaccgaagaaaataattccgattccggccacaatcatcagaataatggtgacgattttgatcatggcaaaccaaaattcaaactcaccgaaagattttaccgaaattaaattcgccgcaccgagaatggccatggcgataatgccgggaatccatgccggcagatcaggaaaccaatatttcatatacgaaccgacggcgataatttcagacatcccgacgatcacccattgaaaccagttgctccacgccgtcatatagccggctaacggatgtatatacttatggccgaacgtcgcaaacgaccctgtactcggctctacatagagcatttcgcccatcgcacgcatgataaaaaagataaagatacccgagatcgcataagccagcaggacagacggcccggtccatccgatcgtgctggatgaccccatgaataaaccgacaccgatcgtgccgcccagcgcaatcatctgtatatgacgcgcgcctaagcctctctttaattctttgtttgccacttcgcttcctcctcttaacagctctgatatatgtgaaataatgaagcagaaggtgcacctgttgaacctaactcactcttcatttcccgcaatattagaaatattctatctttctattgttatataatctccaatttccttatttcatcataataaatttccgtggaaaatacaattgtttttttcaggtaaacaccttgcaccctaaatcaacaaactaaaaataaagcgctttcatttttgttgaattatgaatattgagataataaatgctgcagcctccgagaaacaggatgtccctggagaaacatgttccgccccctattcaatattatttttgctaagcagaatggcgtaaagccttcccctcttccattctcccttgtatacgccataatcctgcttaactcggcaaaaatcatgcattaatcgataaatgcctcattcagccgcagcaaaagccggccgaacatttctttttcatcgccggaccaatcgtcaagcatacgatgataccgctcaagacgcatctttttatcagcttttaacctctgtttgccaagcttcgtaatcgcaaacagactgacccgcccgtcagaaggatcggaaaaacgctggatcagctctttcgactccaaggccgcggcctggcgtgacaatgtggaaatatccagcttaaatgattcggccaattccttcacacgcgccggcccgaattcatccagctgccgtaataacaaatacgcagccctttccagatgtccgattttacggtcggagttatcaagataaacagctctcctgataaaagtggtgagctcatattcaattaattcaatcggatcttgttttgacaacagcctcactccttacattgacaacagcaatattagttgtataatacaaacatatgcacatttactcagaaaacatatagaaagattttgcatacatatatttgtatagtacaaatatatgcgcaaaaagtaaagaaacatatcgaagcatcaagaaagggggaagctgctcttctccaaagaacagcattgtcgtgaaagtcatacgcatcatcttgcaaatcattattttattcgcattttcctttatcgggggagccgttcagcagttctttcacctgcccattcccggaagtatcatcggtttgatcctgctgatcatatgtttatcggttaagatcattcccgccaaaatgattgaagacggagccggatttttgctgtcttttcttccgctgttattcattccggccatgacgggcgtcatcaattacccgtcactgttttccgccagcggggctgctctgtttctggtcatcgtgctgagcaccatcgtcacaatgatcgccgcagggtacgccagccagctgttagagcacaaagccaatcagagaaaggagaaaaagaagtgcagcaagcatgtatcgcaatccttataattttgttcacggctgccgcctatctggctatggtgaaattatatgtgcgctttccatatccctttctcataccggttttgacgactacgattttcattattgccgtgctgcttgtttttcatatttcgtataaagactatatgatcggcggacaatggatcaattcactgctcggacccgccgtggtggctttggcatacccgctttataagcagcgccgggtgttaatcaagtatatgtttccgatcatcggcggcgtgttggccggtttattctccggaatggtcagcggcctgctatttgcagagctgttcggcatcagccggagtttgattttgtcaattatcccaaaatcaattacgacgcctgtcgccatacagattgcgtccggtatcggcggtgtcccttccatgacagtcgtgttcgtcatgatcgcagggttttccggcgttatcttaggaccgctgcttctcaagtggatccgcatccgcagctcactcgggaaaggaattgcattcgggagcgcttcccatgcgctcggcacctcaaaagcaatggagtacggagaattaacggtctccatgagttctgtttccatgacgctctgcgccgtgttagggtcggtcttcggccccgtcgtagcatggatgtttcaaatttaaagctggcggttctccgtcagcttttttcatgtgcggatcatctcattcccttccattattatgtttcatttgtaagaataatggtaaagtagaaaacaaggagggatttaatgatgactggagcaattccgcaaaagaaactgctggatgggacaagcattcccgcgttcggcttcggtacatacgctcttaacggaaacaacggcgttcatgccattaccagcgccattgatatcggctaccgtctgattgacaccgcttataactatgaaaatgaagggacggtcggagaagccatccgcagaagctctgttccgagagaacagctatacgtgacgtccaagctgcccggacgctaccatgactatgacaaagctgtacaaaccatacaagaatctttataccgcgccggtctggactactatgacctgtatctcgtccattggccgaacccgaaacaagaccgctacacggaagcatggcaggcactgattgatgcgaaaaaatggggtctgatccgatccatcggcgtctgcaatttcctgcctgagcatatcgaacggctcgaacgtgaaaccggcgtaaagccaggcatcaaccaaatagaactgcatcccgcttttaatcagcagcagcagcgccaatggcacgaagaacagggcatcgtgacagaatcatggagtccgttatcccgcgccggcgaagtattgaacgatcaaaaactcggacggattgcggacaaatacggcaaaaccatttctcaagtcattttacgctggcatatccagctgggcgccatcccgattccaaaatcagcatcgcccgagcgccagcttgaaaacatctccgtttttgatttctcccttgatgaaaacgacatgagcattatcgactcgcttacccgccccgacggacgcataaacggccaagacccggcggagtatgaggagttttaagaaaacacataaagaaaagctgacggcatcatttgtcagcttttttctcattttatatacgcacacccagctcccgtttccattcagaaagccaatctgtatccccagatccgtattgcctgctttggccgacatcacgcagagatccgtttttatactcaatggacagcaccaaatcaggaatggcatcataccccattctcgccagcttcgtgagcgcctgtccgtaatgggcagccgcttctgccgccgtatgtttcaacaaaggatcgagctgcagcgcttccttatagacgtctaaaaggtcgcgtccgtcttctgtgacgtactttccgtccacgatctgcaagtctttcagatgatagccggtcacctcatacatttcccgaacgacttgatatttctcatatgtttccggcgtaaactgcgaggagtcatcactccggctgcgaatgatgtgcgcaaacagctctttgctgttttccccggagtttaagacagcttcaatctgctgagtgagctctttatcgtcagtcccgctcacttttaacagataatcaatcggtgatatcgtaaatgtaagattcgcaccctccggaatctgaatatgattccgatggaaaagcatctcaatctgctgattcacctgcccgcgctgaaacaccttttcattttcgacttgaatctctccgttgagcgtttcaccccgaaacgccgcatcacggaaatcatagctctgggccttccccttaaacagccattccgtttcattatgataagcggcctgacgctccgattctgataaatcacttctgaaataaggtgaatcggcaagctggtatttatccttaatataatgcaaaggatctggttttcgtttattgatttcattgatacggctgtatttctcatcaagaatcttgctcgcaatatcactctcagactcatacggattattagcgtctattaccgtctcattcccattatccgtaatcgttttctgatttgcagattgatataaacgggacaggctgctccctttctcagtgacaccgctccttgaataattcacctggctcagatcgcggctcccgcctgtctgaatcaataagctgtccgatccttttgccgcatctttcacatttgttttggaagaataccgctgaagcacttgctgagccattacttgattttttatatatcgagcgtttaggcgcatgtttttaacctccgcttgagatgatgttctagtgtttttatcggctgtcttcaagtagattttaaccttaaataacaaatgtttacatagctaatttttctatgtatgatgtagtcaaaaagggggaattttccatgaagaagtatatatctatactatttgtcagtgcattcgtattatcaggcgcattgtttgcatcttcaccttcagcctctgcgtctcaaaagaactcgttacaaataagcgccattacaggaaatcattcatttgaaactgccaatccggtaggctactggaaatataaaaatattgatactgccatattgccaaaaggggaaaaagattcgtatttcactttcacggcaaataagggagaaagactttatgtcaggagttcaacaagaagtgaatacaagggaatggacattgaaatttataataaaaataaagtactgatcagtaaaagcacagaagtgataaatcctgatacggcgctaccttttatctatgcgaatacagatgcgaaagaaaataacgagacgttctacgtgaaagtgtcccgcggctcctacactgacgatatgtactttacactctctatttacgaccgaatcaaatccggcagtgagaccttctcattcagcggtacagctgaaaataaagggaacacaagcctcagtccgaatggatcagattcaactgttcttagactcgacttaaccaaacagacaagcattccaagagacgccacagtgaaaagaatcaacaccaccgcaacccaaacaccaagccaaggaaatacaagccactacataatgtcggaagaaaataaagtgtggcaccgtgcacttgcaaacagctccactcaaggaaattacggtatcacactggatgataacctctcagtctcaagcatctggaattttaaatacaacacactcgcaacagcaaaatcgactatgaaaaatgtgaaattgaagattgattatgagtacgatgtgacaacgcagttttaattagaagaacagccgcccattgtgcgggcggctgtctgcttggagttaaagtaaatttatgaacccgtgccatgccgtatcctgttataacttgatcagttgctaaaattcttttttatgatatatagctgcggcaatgaaaaatgaaatgatatataagataacgccgatcatgagatatataatcgggacatataaagaaggatttatgtgcaaaaatgacagcggtacttgttctgctgcatacccaacgacactttgcaatccaaacgtagcaaaaagtccccccattgctcctccaatcacgatagcatcggatttttccgggcctatcatgtagagaagaggataaacgattgcaccggcaaagagaacgatgaacgttccaaaagagacaatattaaatatgccgtcaatcggttcatcagaacccaggctgtatacaaggaaaataccataagatattacagctccgatcacaacaatcaaaagatagaagacatagtggctttgaacaatatttgttctgctgaccggtaaagtcaggacatacctgtcatagccagacttgctctcatactttataacctcaagtgcgggcatgacgacaaacaaaataatcagcatagcaacaaaacgatgcattgaagcatccccaaaataaaaaatgactgctgataccaatatggccaaccccgtgtatgcaaagaaactccgataaaccaagtaatagttagtcagtaacagacctctcaatgttttcactcctcgttaaaaagacgctgatttcttctatggaaatggtgttggccgttacgccattcggcaatttctgttgatccgatacaagcacactccaataagatccacgatccctttttgctagaacgatatcttcgtcaagctcagccaatcggccttcatcaacgtctataacggtatagctttcaagaaccttatctttctcttcatttaataaaatttcgccatctttcataataacgatatggctggctatcttctcgacatcagtcataatgtgcgatgaaagtaaaataccgccgttgcttttgctcacaaagctttttaattcatttaacagatcatctcttgaagagggatcaagccctcccgttgcttcatccaggagtaataattttgcattatgcgacaaagcaacagctacggataacttcattgacatgccgcgcgagaatgtattcacttttttgtccataggtaaagagaaagaatgaaccaaccggtaaaaatgatcttggtcccaagcaccgaatagtttcttaaatacatgattcagctgctttatcgtaaggtgcgcaggaagattcatcgcatcaaatacgaccccaatatcttctttgaactttatatgtttatccagattctctttaccaaagattttcactttacctctatcctgagaaattaatcctaatatcgttttaaatgttgttgacttgcctgcgccgttatcaccgataaaaccgacaattgatccggcaggcacattgaatgtaacatcctttaaaacagctttatgaccaaaagatttgctgatgtttctgatttctaaaaggtttgacatcattccactcctatcattgtcgtcaggacttttttaagaattgaaccggattattgcaaaaatgttgtgattttcatatctggtctaggtattcataatggatcaggagtcgggaaatacaaaagggattttaaagtcttaagcataatatggaagtgtaatcgattgattacgtttatataatgggatattcatgatgaaaactgctgaggtgtttactttccgatgaggtatacacaaaatgatttactaatgattacatttatggattttaaccggaatgcatctcgtattataaagcaggtgttactccttttcaatatataaaaggggatttctttacaatcgcaaagagtatgcatttctcatttccgcattaaaaaacccctctggctaataatgtagctttcgaataaagttcaattaaaagcattttgcaaacgttgattttataatagaagaaacccacacattttgaacaaagtttgatcaaaatgcgtgggtttgatttttgtgtggagtttggttttataaaaaagattgatataaaatatcaatttcccactatgtatatggcattaactaaattcaaagcaatcatttagttaacactttggttaatttcttttataaaagctgtatagtcagatgcttttaggtcacttaaattagtattgttccaatcacttatatcagataaaaattcactgacgttatttgtgatactctttattctttttaactcctgtaaaggttcaatcttatttgtatcttgagttattttctgaatcatttccgagtatgccttctctttctcttcccaatatgatatatatcctatcctttgctcaaaagaatatatattagctgcaattgtagtcggtatctctgaaagtgaaggtacaaattctttatcagaatcttttagtataactaataacattttctctttatattcacgcgaacgcataacttcagatatctcatacatacaatttactgattttaaatattggtcactaataatactaataacaaaatcgtgtttcccaatagttttcatgaaatctttaatactatctttaaactcaatgtttcgaacatctctagtcaaagtataccccatatttttgaaatcattatcaattaaatcagcaaacgctacatcattccaacaatatgaaataaatatcttctggttcttcatctgttcagccactccactatcaccaattttataaatcgttttatttactgttactaattcctctgctttattaatagagatataatatagcctaatgtcttttaaagtaaagtactcacttttaatatttataataccctctatcaaattttgaactctctccaaaccaaatctaaagggaaaattctttatttctaatctttttccatcatctcgtattccaaagactatatctccaccgttactgttcgagtatgcaacaattaattttgctatttcttcatgactcgcaattgggtgtatatatgttgtattctgtctattatttgtacttattttgttttcaatatctttaattgttctaaacactaaaaagtacctctcttataacttagtcaatggaattttagatatacctgttgttttaagcaaatcacctaaagtaaccattcgttgtacttctccatcatccgtccataattgatagttgacatcatctaaagcctctaattcttcatcataataaaatattattttttgataatcacttggacgaataatgattctaaaatcatttccgttatacttagccggaaataccgtatcagaatacttttcattcatccattcttctaaagttgccggaagtgtataatctttaagtctgcttaaatacttaaaaatattttctgtacttctatgtagtaatttctcaacatagcgtttcatttcttcggatgaggtaataacatgttttaattgattgataatatcttctttactcagttcagagttagttacaatctccattattttatctcgattattaataatttcatctaattcttcaaacttaatgttattttcctctattttttccgctattctatatcttctcagattttcttctggagaagataacatcattctctttgaatataaattcccaaaccatttttttgatttttcaggatttgataggaaccaattagttaatctattaaatattttttgggtagattcatttctttctatcctgtcaatagtttcctcactgagaagttttgatactttgagctcaatttgatcagagcatatttcattagtcttaatttttttggggtgttcttcgaaatagtgttcaaatgaaataatatctactttcaataactgtccttcaattttctcacccaataatgttaagatctgttttaattcttgatctatatttttatcaagataaatacaggcgaactgtacaaattcattaatttgattcggtacaaatgccgattttacaacttcatcaatacctgcatccttaatccaaagagaaaaaaatgcatttaaccactctgcatatagagtcttatcattcaaacaagcaactaatttatcaatatttgaatcttcaaaaatatcgtttatccaagagaatccagcattctctccaaaaacctccgcccagcctaagtaagtatctttagttggtatcgatactccgttataattagataaaacatcccaaagtaagtccttatgtgtgcttttttttgtttttggtatgcctattgctacgttaccattattatctttaaatgctaatcgtttcaaatcttccaaatgattatgaataggaacaattggactcttctcaatatgctctttaatttctttatagctataagcctgaatatttgatgaagtagagggttttaaaatgcaaatattaaattcatttcttgtccttttactttctgaacaataatctattaattccttgtataaagagacagctacctttattaattcattatttactggattgctatctctaatagcatttctgtccctttctacttcaaataatcctgaattaactactataggaaaactaaatttttcagttcctaatagaggaaattcacaaaagacccttggcatggcatcaggaattggtaagaaatataatttcttgtctttacgttcgatagcacaaccaatagttacattattttcatttaatattagcaactctttaatactatcagaaacgttaatttgaacagcttttagcttgttatttgaacgtgaagtttctactttctcctttttgtaacaatcaccattgtatgtaatagagttgatattcttattaaaagttaatacataaggaatagtctcttttaaatcttctatcccttcctctactgcttcttttatgtcatcatcctgtattaaataaacgaattttgtatcctcatactcttcttgtaattcctcttgatttctgcttacaagatctaattgttctagcataatttttgttttattcttaatatcgctataatcatctcctgacctatcaacaatgaactcaaattttgtatacctactatcttcttggctaaacgacccttcaattcgtacaacctctgataataaatgagtcgacataaaacctgttccaaattttcctgttttcttttcttctgaactttgcttagatgagatttgtgtgattaaatctaataaattttcatacgaaaatggcagtccattatgactaaatatgatttgattattagagtaatcaatttttatatctattttcttacctttaggtgtacagtctgatgcattttgaattagttcccatatccatctacgcctaatagtctttttttctatttctgaagactctcttatctttttcaattcatcccaaattgtattagaactcgcatctaaaactttatttaataaaacctcttcattagacatagtaataatcaaacctctttttccctgtatttttctgaattcccgggtattaatttctttttattttcggcattataagatttgaggagccttctatattattcatttaaatatcctttacgaattctccaactctcttgatttaagtaaagatgataatattacctagatctcgaatgggtttaaaactacttcaaaaacattaactgatatttctcagtatattgattttgtacaaccttctaaccaatatttattcgtctccctaagcctttatcataacaatgtgttcttttgttttaagaactgtatgatggtttatttctaactcatctgcaacctttcattgataatataatctaatgattatcttgtatgctaattttattttctaaatattcagttaaatgttataattattgttttatatcagatagaaggctcctactatcttccttattcaatttattataaacgatgagcatcctttttgaagttaatacttgaatgtttagctccagtttatgtattttttagctcctatacctttttcaatcaatttttctacttagttttctgtttagacatgaaaatacccctttagatgagtatatctaaaggggtagaacggtgcaactttttccaggaacaatacaaactttgaatttaaaacaacatactgttttctttccttgtcaaatccttattccacagtcacactcttcgcaaggttgcgcggtttatcaacgtcacagccgcggtgcagtgcagcgtagtaagcgatcagctgcaatggcacaacagataccagcggagcaagcgcagggttgacttccggcaggatgaatctgtcgtctgcgtcttctaagcctttcagcgagatgatgcaagtgttggcgccgcgggctgcgacttccttcacgtttccgcggatgctcaggttgacgtgttcttgtgtcgccagtgcaaagaccggtgttccttcttcaatcagagcgattgttccgtgcttcagctcgccgccggcgaagccttccgcctggatgtaagaaatctctttcagcttcagggcgccttcgacacatacgaagtagtcaaggccgcggccgatgaagaaagcatttcttgaaacagtcaggtactcacgcgcgatcatttccatttcgtccttctggtcgcagagggcttccatggcgtttgccgcaatacctaattctttgactaaatcaaaaccgatatcaacaccgttgcgttctgctgcaacggacgcaaggatcgcaagcacggcaatctgagccgtatacgcttttgttgatgcaaccgcgatctcagggcctgcgtgcagaagcaatgtgtaatccgcttcacgggaaagcgttgatcccggaacgtttgtgatcgtcagcgctttgtgacccagcgctttgacttgaacaagcacggcgcggctgtccgctgtttctccgctttgagaaaggaagataaagagcggcttcttagacagaagcggcatgttgtaggagaattcactcgctacatgcacttcaaccgggacgtttgcccacatttcaatatattgtttcccgacaagaccggcatggtagctcgttccgcaagccacgatataaatacggtccgcttccgccacggcgtcagcgacatcgccggccacggccagtctgccattttcgtcttgatacgtttggatgattttgcgcataacaagcggctgctcatccgtttcttttaacatgtagtgagggtatgtgcctttttcgatatcactggcgtcaagctcagcgatataagacgcacgtgtcatgacttcaccgtcaaggtttttaatcacggcttcgtcttttgtcacgatcaccatttctttgtccaaaagctcaacgtattcattcgttacttgaagcatagccatcgcgtcagatgccacgacgttaaacgtatctccaaggccgattaacagagggcttttgttttttgcaacgtaaatggtgtctgtgttttcaccgtcaaataatgcaattgcgtaagagccttttaacagagtcagtgttttgcggaacgcttcttctgtgctaagtcctcccgccacaaattgctcgatcatttgaacgactacttcagtgtccgtgtcgcttttcagttcaacgttttcaagatattcgcgcttcagctgaacatagttctcgatcacaccgttgtgaacaagtgtaaagcggccgagtgcgctttgatgcgggtgagcgttcaggaagcttggttcgccgtgagtcgcccagcgtgtatggccgattcccgcttgagattcaaccgtgtgatccaccacttcacgaaggtcggcgatgcggcctttttctttgtacacatgcacgccctgctcattcgccacagcgataccggcagagtcataaccgcggtactcaagcttctctaatccttttaacaaaatctctttcgcatcaagctgaccgatataacctacaattccacacattttttcttcctcctaaaggtgcaaaaggagacgaagaaagtcaaattacaaggggactttcaatcgtcccctcccacatgtttttttggaagatcatgtgatttctctttgttcggagagtcgcccctccggtttgaagaaatccttacggctgtgatctaaatgaatcagccgggaggcatccgccgaaaattcgataacctccatcctcgtcaactaagccgtttttcgggcgcttagttcgggcgctgtaattataaaagatgcaaacaatcccgcctttcctgcaagtgaaaaacaaaggctgaacaagcttgattttacagcatgtgccaaggacggtcaattattttttgccgccccggcatcatgtttactatcatattatgctgatcgcacttgtcttgttcgctctctgcttataaacttcgctactccgctcccatttctgtccgcacgacatccacgatttttgtgacatattcgtcacaaagctcttttgttctcgcttcggccatcacgcggacgagcggttcggtgcctgacgggcgcactaaaatccggccgtctccgttcatttctttttccacttcagaaataacggccttcaccttagcgttttcttctaccttatatttatccgtcactttcacgttcactaagagctgcgggaattttttcatttcatccgcaagttctgaaagggttttgccggacgccttcagcgtattcacaagcatgatcgcggacaaaagaccgtcgccggtagtgttgtaatcaaggaaaataaggtgccctgactgctcgccgccgacattatagccgtcttttttcatcgcttctacgacatagcggtcgccgactgccgtttgaacgcttttgatttcttctttttcaagcgctttgtagaaaccgaggttgctcatcacagtcgatacgacggtatcatccttcagacggccctctgatttcaaatacttcgcgcatatgtacataatctgatcaccgtcgacgatgtttcctttttcatcaacagcaatgaggcggtcgccgtctccgtcaaacgcaaggccgatatcggcgtttttttctttgacgaaagcactcagcgcttccgggtgtgtagaaccgacgccatcattaatgtttaatccgttcggagacgtccccattgtagatacgtcagcatcgagatcggcaaaaaggtgcgtcgcaatggatgatgtcgcaccatgggcgcagtcaagcgctacatgaatgcctgtgaaatcttcgtccgccgtctgctttaaaaattgcagatacttttgaacgccttcaaaataatcgtttacaagcccgaggtccgcgcctgtcggtctcggcagcttatcttccggttcatccatgagacgttcaatctcggcctcctgctcatcagaaagcttaaagccgtcccctccgaaaaatttaattccgttatcctgtacggggttgtgagaagcggagatcatgacgcccgcctcagcatccatggctttcgttaaataggatacccccggcgtagaaataacgccgaggcgcatcacttcagctccgatcgataaaagtccggcgacaagggctccctccagcatatgtccggagatacgtgtatcacggccgatcagcactttcgggcgctgcttatctttggtcaggacataaccgccaaaacgcccaactttaaaggccagctctggcgtaagctcgctgttggcaacacctcttacaccatctgttccaaaatacttgcccattttgtatcgctcctttttcattctgttgaagaagaatcagcgcttgatccgtcttcatcctggtcttgattttgatcctggttttgacttttattctgatcgctgtcagtgtcgtcttcccggttcttgttcttgtctttgtctgcgtctccgcttgtgccgttcttattgccggaatcagcggagccgccgtcatttttatttgaacttgtgtttttcttagaagtcagcttgatcttaaccgtgtcttttgacagggaccatgtgacgttttgcgggccgtttacttcaagctttacagagtgctctccgtcatccaagtccgagacattggcatacagttcaatgtccgactttttcagcgccttaatgttggcgggagagcctttggccgtaatatttatcgcctgcgattcaggatcgagaaactcaatctgctgtgagcctcccagtccgaccgtcttgattccgacattgtcaaaatcctttttgtcttcactgtccactttaacatgaagcgtgattttttccggtgataccttagtgacacccttaggaagcgggatatcggcattgatatcggtatctttatcaattttgcctaaatcaagagatacgccgtcaataaattcaagtgaatccagcacatcctgcgggccgtaaaccgtcacctcactcggattcgagtcaatgctcgcaacgctcaccccgtccggaagacttcccttcctttcgattttgaaaggaagctttttgctcggactggctacgggaaccgtcactttaatgactgacggttcaacatcaacaggaagtgcgttgccgtctttgtcatagacggtcaccttcacttccttttcaatggtctcatttgcattttctaggttcacggatgctttgacaagtgaaatgttatcaatcacatttttcgaacctgtaatctgcacgtttttcgggctgataatcggctgctgaggggtgtatccctttttcattttgcttttattgtagtattcaacttccacgggaaaactctcagccgttttttcctgaatcgtaaccgtcgtgactgacgggttaatggagatcgtcagtccgtccgatacgtttttcgccttcaattcgaccttatgagtcccggtcttcagcttattcatatcggcgtatatctcaaaattctttgtctgtctcgcctttttcaccgcgcttgtcgagcctttaatcgtgacatttacggtctggggcacgccggtgacgacatagttcgcttcatcatagtatgcttttacaggaatatcagtaagcgtagcctcgtcagtcgttgatgtcggaaaaaaggattcccccggctttttcggagtcggcgcctggttgttgttaaccgcaacgtaaagcagcagcgcaaagagcaatgcaatgatctttacagcccagcggttgtttaagaatttatccatttttcttgcccctccagtaccagcggttagaagaagtatctctggcgtttttcttaaactcggcttcaagcatttctttcagtgcttcttccgtcaattctctgtgaaggtctccgtttttggccacactgatggcgcccgtctcttcagatacaataatggttaagctgtccgtcacttcactgatgccgacagccgctctgtgacgcgtccccagctcctttgaaataaacgggctttcagaaagcggcagataacaggcagccgccgcaatctcgttatttttcataatgaccgctccatcatgcagcggtgtattcgggatgaagatattaatcaaaagctccgagctgacctgtgcattaagcgggatgcccgtctcaatataatcgcccattcccgtatcgcgctcaatcgcgatgagtgcgccgatgcggcgtttcgccatgtagctgatcgattttgtaatcgcttcaattgtcttatgctgcgcttcctccacgggggttccgctcctggaaaagaaccggccccgtccgagctgttcaagcgcccgtctcagctcaggctggaatataatgatgatcgctaaaaatccccatgttatcgcttggtccatcagccactgaagcgtgctgagtcccaaatatgaactggccatccggaccaatacgatgacgacgattccttttaaaagctgaaccgccttcgtcccgcgtatgaccatgattaatttatatatcacataccaaacaaggagaatatcaacggcattgccgaggtattgcaaaaatgggatgtcctcaaaagccatttcctcgtcctccaagaattcagtcatttcgtttttctgttatgaattgtgctgcatgagcaatatgtacatcatatagcgtgctcattataccacattttgatttctcaagtgaaatgagccagagcggcgatgcacaaaaaaagagtaaagcgattatacgctttactcatcttcactcgggtccaaagcgctcacgacgccctggcccgccgatttcagttcgtaccagacccagtcaaacaattggttaatctcttcaatctgcccggtgacttgtccggctgaggccatgtatttttctccgttgacgacggtcacattgccgtcgacttttccttcaatgaacagcttgccgttttttactgtgacatcgccctttacggtctcgccttcagggacggtgaccgtgtgattctgcacgacaaggttcggctgtttggacacactgaaattgtggtcattatgccagctgttgaaaaaaccgccgcccattaaaatcacaaaaaccgctgcggctgcaatcatcggatgagttttgatccatcgttttacagaagcgcgttttttctcttttggaagattcgccataactttggcagtaaaatcagcaggggccgtgacatgcgatgtgcttcggacgagtgctacggatttctccatttcatgaaaatgccgtttgcaattcccgcatgactgcaaatgttgttttaatacgttttcatcttcaggaaggatatctccatcaagatgcttatgcataagctgcacaatctgttcaggacagctcatttcatcaccccacttaaagatccctcaattgttttctaagagcctctctgcctctgtgtatccttgtcttgacggtgccgacagggatattcagaatctccccgatttcaattaaagagagttcgtcaatatactttaatacaataaccgttctgtacttgtcaggcagctttaaaatctttttctgaattgtgtccgacagctccaatgacaatacggcgtcttcagggagaaccccgtccgcggcgatctgcgaatacatcgtcagcccttctgctcccgctacttctgcgtccagatagtaatcaggctttttcttgcggatgcggtcaatggtcaggttggtcgcaattctgtaaagccacgttgaaaactttctgttgatatcgaaactgtcgatattgacatacgctctgataaaagcttcctgcgcaatatcttccgcttcgtgaacattgccgagcatgcggtagcaaagctggtaaatcttatctttataaaggtcaacgatttctgcaaacgcattttgatcgccttttttgacttgcttgattctttttttaatcaggttttccatgttttatcttacctctgcccttcaccggtctgtatctatacgttgattgttttaaaaggtttcattttttttattacatttattttaccaaatttcaggcagggtgtagatggaaaatacagaatatactgccttaacagcagcttaaaaatagtatatctgatgaacaatcagaaatcgaaacaaaatgctgataaaaaaagacacctttatgcaaaaggtgtctgagactgggctagctggattcgaaccaacgcatgacggagtcaaagtccgttgccttaccgcttggctatagcccaaaaatggtggaggggggcagattcgaactgccgaaccctgagggagcggatttacagtccgccgcgtttagccacttcgctacccctccgtatatttttgaaaaacagtgccggccagaggacttgaacccccaacctactgattacaagtcagttgctctaccaattgagctaggccggcaaatatggtggaggatgacgggctcgaaccgccgaccctctgcttgtaaggcagatgctctcccagctgagctaatcctccatatgacccgtacgggattcgaacccgtgttaccgccgtgaaagggcggtgtcttaaccgcttgaccaacgggccgttgtgtccgcgtcgagctgacaaaagttattatatacaggttgtaccccatttgtaaagaggaaaattattttttttattttcaaacttttttacccgttttttaactgaaaaactcatccctcctctcttatttcatttatgatgaaagtatcaaaatattgaagggaatggacacagatgatcttagtcagctcttgtctcggcggtatcgaatgcaggtataacggctctcacgccgcttcggaaaaaatccgcagactcgtagaagaaaagaaagctgttatggtctgccccgaacttttgggcggcttcaccactccccgcgaaccggcggaaatcatcggcggcacgggcgaagacgtgctgaacggaacagcaagaatcgtaacggcatcaggcgaagacgttacggctttatatatggacggcgcggaaaaaacattagcatacgcaaaagaaataggcgccgccacggtcatccttaaagaaaacagtccgtcctgcggcagcagctttatctatgacggcactttctcagggaaaaaaataatcggagacggcatcacttccgctcttttaaaacgggcaggctgccgtgttctatcagaagatgaattggatcaattataaaaaaggagagtagatatcatggatgtagccctgtccttttataaaccggagcatgcagacggactgaacgggtttgtgctgagtgaagaagataaaaagttcacagctctcccgaaggatgtcctgccgcaggctcttgtcatccgggatcgctacccgacagtcattttaaaagaagaccgccccgtcggtttttttattttacatacctcaaaagaaaccattgccccgtattcgaataatgtgtctgccattttgctgagtgcgctgtccttacatgcgccgcatcagggaaaaggttatgccaaacaagcgatgctgcagctccccgcttttgtcgcaaattactttccttggtgtgatgaaatcgtgcttgctgtaaaccatcgcaatcatcgtgcaaagaacctgtaccggtcttccggttttattgataaaggtcgtcgcaggatcggcccgatcggtgaacagcacattctgcatcattttttgtgaaagcgcttgattattcatctcatccctgccgatttttcttgaaacatctattcagaagcccatatacttcaagtattaacgacttgggagggtacaatcatgacagaccggcttaacattcacagattgaccacagaaaccagaaatccgcagaccgcttcaatccatcaagcagacacgatggaaattctccgcatcattaacgaagaggatttcaaagtggctgaagccgttcagcaggtgctgcccgatattcagattgccgttcaattcgcccatcaatcattacggcgaaacggcaggctgatttatgcgggagcgggcacaagcggcagactcggtgtactggatgcggttgaatgcccgcctacatacagcgtaagtcccgacactgtcatcggtctgatggccggaggagcagacgcctttttgcaagcggctgaaggtatagaagacagcgaggaaaccggcgctctcgatctcaaaacgatcgggcttaccgcagaagacaccgtgatcgccatcgcggcaagcgggcgcacgccgtatgcggccggtgcgctgaaatacgcaaaaacaatcggcgccaaaaccgtcgcgctcacatgcaataaggactcattgatcagcacctttgccgatcacagcattgaagtcgtcgtcggccccgaagtgattacagggtcaacacgaatgaaagcggcgacggcacataaaatgattctgaacatgatttccacggccgtgatgatcaaaagcggcaaagtgtacgaaaatttaatggtggacgttcatgtcagcaacgaaaaattgaaagaacgcgcaatcggcattatccaaagcatcacgggcgttccgtacgacaaggcaaaagaaacgcttgaggccgcaggcagccatgtcaaaacggcaatcgtcatgctgaagacgaattcagacgaaacacacgcgaaggcactgctcaaagaagcagaaggcttcattgacaaagccatagaacagcacgtttcaaaagaaaaagaacgctgatcgttctttggtgaaaaataatgtgcttttacgagcccgcgccgttttcatgatcggcgcaggcgcttttaggacgcgtttcaggcacagctccccgggaaaaatcgcacggaaaaaaggaggatctccatgagcaaagaggcattttatcagtcactggccaaagatatcctggacaattgcggcggttcatcgaatatttcaggctttacccactgtatgacacgcctgaggattacacctttagatcgggacaaaacggatattgaggcgctgaaacggcttgacggggtaataggcgtcgtcgaagccgaaacactgcagatcattctcggcacgggtgtcgtcaatcatgtcgccgacgctttcgcaaaacttatgtcatccggaaaaaacattgatttaaaagaagccgcctcacggaaaaaagccgatctcaacagaaaaaacaccacacccatcagactgtttctgagaaaaatatcaagcatcttcatcccccttattcccgcactcattgcatcaggtttaatcaccggtattacgaaagccgtcattcaggccggctggcttccgaaagaatcccaaatcgcacttattttaacggttatcggttcaggcttattcgcatacctcggcgtccttgtcggcatcaatgcggcgaaggaattcggcggtacacccgcgatgggcggccttgcgggcatattgatccttaaccctgagatcgccaatatcagtttgttcggagagaatctgctccctggcaggggaggattaatcggcgttcttttcgctgcggtttttatcgcttataccgaacggtttatcagaaagtacgtccatcaatccatcgacattatcgtcacgcctacattgtctttacttatcaccgggctggtgacatatgtcgtttttatccctgcaggcggttttatttctgatctcattacatcaggtttattgtcgctgctgaatgtcgggggagtgctctcagggtttgtactgggagccgccttcctgccgcttgtcgtcaccggcctgcatcagggcttgactcccgtacatttggaattaatccgatcaatcggagatgacccgcttcttccgattctcgcgatgggaggcgcgggtcaagtaggggcggccttcgccatctttatgaaaacaaaaaaagcctcattgaaaagagcgatcggcggcggacttccatccggtctgctcggaatcggagagccgctcatcttcggcgtcacgctcccgctcggccggccgtttttgacggcgtgtttaggggcgggaatcggcggcgcctttcaagcccattttcaggtggctactttttcaatcggtgtctccggccttccgctctcgtttctcgtacagccggctcaaatcgttttgtatatcatcggtctcttcatctcttacgcggcgggctttgtcttcacttatgcgttcggatttaaggatgacatggctgctgaatttgaataaaccgggagggatcagaatatgaaaacactgacagccgccatactcacaatggtcatcagcctctcttttctgccgcagcacaaagccgaagcccaatccaaattatacgacgtagcaaagcttagaaaggttgatcaaatgattgaaaaagacatcgcagcaggattccccggagccgtcctcgtcgtcgtaaaggacggacgggtgatcaaaaagaaagcatacggctacagcaaaaaatatgacgggaacgtccttttatcgcgtccgaaaaaaatgaaaacatcaaccatgtttgatctagcttccaatacaaaaatgtacgcggcgaattttgcattacagcgactcgtcagccagggaaagcttgatgtgtatcaaaaagtctcggcttaccttcctgatttcaaagacagaaaaagcgatccgattcaagaaaaagaccgcattcgcgtcatcgatgtgctccagcatcaatccggtctgccggcaagcttttatttctatcagccggacaccgcaggccctttgtattcacaagaacgggataaaacgatccgttttctcactcaaatcccgcttgcatacaaaccgggaacaaaacacgtatacagcgatatcggttacatgcttctcggctgcatcattgaaaacataaccggaaaaacccttgatgcctatgcggaacaagaactgtacaaaccgctgaaactgacgcacacactgttcaatccgctgcaaaaaggctttaaagaaaaatcattcgcagctactgaacgtttaggcaacacacgtgacggagtcatccgtttccctcacatcaggacgtatacgctgcagggggaagttcacgatgaaaaagcattttactcaatgggaggggtgtccggtcacgccgggctgttttccagagctgatgacatggccgtccttcttcaagtcatgctgaacggaggcagttataaacacgtttctctcttcaataaaagaacggccgatttgttcaccacggcggcatcctctgatccgactttcgctctcggctggcggaaaaacggcagcccggatatggagtggatgttcggcccttatgcaagcaggcaggcatatggccatacgggatggaccggcaccgtcacgattattgatcccgcttataagctggggatcgcacttttgaccaataaaaagcattcccccgtcgtcagtcccggtgaaaacccgaatgtttttgaaggggatctttttccgactggaagctacggcagcatcataaaaacgatttatgaagccattgaatgacaacccatgtcttttgtccaaactatgacggcaggagggcaccatcatgaaacttgttatctcagctgtattactgttgttcattgttttcggcacgcatcatgtatcgacaaaaccggacattccgtcacaggcggaacaagcggtatcccgtatgacattagatgaaaaattagggcagatgctcatgcctgattttcgcaattggcaaaaaaaggggcagtcatcacctgaggctcttacccaaatgaataaagaagtcgcagggcttattcaaaagtaccggttcggcggcgttattttattttcagaaaatgtaaaaaacactgaacaaacggtacgcctgacagatgcctttcaaaaggcgagccctgacattccgctattattaagcattgatcaggagggcggcatcgtaactagacttggtgagggcactcatttcccaggcaatatggcgctcggagccgctagaaaaacagcctacgcgtcccagaccggcgccattatcgggaaagaactgaaagcactgggcattaatacgaacttcgctcccgttctcgatatcaataataatcccggaaatcctgtcatcggcgtcaggtccttcagttcagaccgagatctgacagcttcactcggtcttgcctcaatgaaggctcagcaaaagcaggatgtcgctgccgccgtcaaacatttcccgggacacggcgacacggatgtcgacagccactacggccttccgcttgtcacccacaatcaagaaaggctgcgtcagattgaactttatccgttccggaaggccattcaggccggagctgatatgatcatgacagcccatgtgcaatttcccgcgtttgacgatacaacctataaaagcaagctggacggttcagacatcctcgtacccgccacgctctcgaaaaaagtgatgactcatcttctccgtgaggaaatgggctttaacggcgtcatcgtcacggatgcattaaatatgaaagccattgccgatcatttcggccaggaagaggcggtcgtcatggccgtaaaagcaggagtcgatattgccctgatgccggcccaagtgacatcgctgcaaacagaaaaccgctttgcccgggttcattccgcattaaaaaaggcggtacaaaaaggggatattccgctgcagcaaattaacaaatcggcggaacgcatcatttccctgaaaataaaacgagggatatatcccgcaccgaaagagacaaatctgaaaaagaagattgcaaaagcaaagaaaaccgtcggcagcaaaaatcacctgaaagctgaaaaacaaatcgcggaaaggtccgtcaccgtcttacaaaacaaaaaccgcacgctcccattcaaaccgaaaaagaacagccgcgttctcattgccgctccatatgaagatcaaacagcgtcaatggaacaaaccattcggcagctcatcaagaagaaaaaaatccggccggtaaccatcagtaaaatgaacttcgccgagcgcacatttcatgatgaacacaaaaagcagataactgacgctgattacgtgattacaggctcatatgttgtgaaaaatgatcctgtcgtaaacgacggcgtgattgacgattccgtcacagatcccggcaagtggacgactgcatttccgcgggcagtcatgaaagccgcacaatcgaaccaaaaaccctttgtgctgatgagcctgcgtaatccatatgacgccgcgaactttgaagaagctgaagcccttatcgcagtctacggctttaaaggatatacagacggacaatttctccagccaaacattccggcaggcgttgaagcgatattcggacagacaacaccgcaaggcaggctgcccgctgacattccttccgtcacgcatccgggaacgacactgtatccttatggtttcggtatcaatctgaagaccggaaaaccgctttaaacaggaggactgatcatgaaaacacaaacggctgcgcttcttgccggattagtcgtcatcagtgctatgacggcagtctcggcggcttctgacagaaaccttcataccgccaagaaaccaagcatccaaacaggcatcgaccgcctgctgaaagattataaacaggaactgaagggaaaaagggtcgggctgatcaccaacccgaccggtgtgaacaattcattgaaaagcagcgttgacgtgctgtatgaggcaccagacatccacttgacggcattattcggaccggagcacggtgtccgcggcgatgctcaggccggagacaaagtcacatcgtatatagacgaaaaaacagggcttcccgtctacagcctgtacggggaaacgaggaaaccgacgcctgacatgctgaaagatacagatgtgctgattttcgatattcaggatgtcggaacgcgatactacacctacatttatacaatggcctatgccatggaagcggcaaaagaaaaaggcattcctttttatgtattggaccggccgaatccgcaaggcggacgaaatccggacggcccggttcttgaaccggattacgcttcatttgtcggactgtatccgatcccgctgaagcacggcatgacgatcggtgagcttgctcttttattcaataaagagtttcatattggcgccgacctaaccgtcgtaaaaatgaagcgctggaagcggacgatgacgattgaagataccggtctgccgttcgtcctcccttcgcccaatatcccgaccccggacagcatattcgcatattcggcgacaggactaatcgaaggcacaaacgtatccgaaggaaggggcacgacaaagccgtttgaactgatcggcgcgccttatatgaaaagcaccgagctcgaagaacgcctgaacagtctcaagcttccgggcgtcaccttcagagccgcatcatttatccccagcttctccaagcaccagggcaaactgtgccacggcgtacaagtctacgtaacaaacagaaatacatttgaagcggcaaaaacagggctttccattctgaaaaccatgcatgacttatatccgaatgacttttcattcttgccgacaggctcttttgacaagctgatcggtaacggctgggtacgcaaaaaaatagaaaaaggcacttccattgaagacatcaccggcacatatcaacgccggctggaccaattcaaaactctaagaaaacaatacctcatatactgacaacattcgtgttacacgtgtaacattttgacgcatttcacatttccgctttttataggaaaacattcatttatttggtacaatttaaatgataacagttatcatttaaatgaatgtttcctaaaaggtggtttctcatgaaaaacacattattctttcagcccattgatatcatctccgtaaaaaaaacagccgaccttctgtcagagcatcagctcactgattcccccgtattgatctttcatgtgaaaggcgagggacaaattgatatcggaacagacagctttccgctgcagaaggaaacgctctacatctgtccttgtgatgagacattcaatattgcccctataccgtcaggcggcatccatttgtatatcgtcagactccgtgttttctcctattcatcagatgatgaagcgatgcttccggataacggggaagacatcttccacggacttcagcaaatgaatttacaaacggttgatcatttgacaagccggcttcagtcactttctgaaaacgtgcgatcggcggatgcattgcagaaaatgaaatatacagccgactttcagcagctgatgtatgacctttatgccgcaaaagtatgccatcaaaataatacgaaagcggcgatcgaacagacaaaacaattcatacatgctcagtccgacacaaaaatcacgctcacccagctcgctcatatggcgggaatcagtcccaagcattacagtgaaacctttaaaaaactatacgggcagagcgtaactgaatatatcacagacatccgcataaccaatgcgaaaaaactgatggccaaagcaaactgcaaactgcgggaaatcgctcatcaaatcggctaccaagacgaattttatttcagccgcatctttaaaaaacataccggcagctcacctacaagctatatgaaaaaaaggcgcacaaaaatggccgcgtacggaaaagaaacgatggggcatctgattcctctgcatcacgtgccttatgctgcggcgctgcacccgaaatggacggcctattattacaaacaattctcttccgatattccggttcacctgagtgcttaccgctataatgcaaattgggaagagaacctgcacacgctttcccaagctgccccggacatcattttcagtcttgattctgtcagtgaagaagaaaaacagcgcctgaatgacatcactgacgttttttaccttccggctcaagagaattggagagaccagtttcttcgcacagccgcatatttgaatgaagagcaggaagcgcggcactggcttaaagcttatcaaagtctcgcccattcagcgaaagatgctctgaaacacgtgcggcatcagcggttcttatttgtccgtgtatataaagaaaatatgtacatcgcccataacaacagtattgaggatgtcttcttcggtgatttaggctttgcctccgcaaaaccggaatcttttgctcctgacgaaaagatttccttggacatgctggcggattgccaggctgactgcatcatgcttttcacttgtaaagaaccggaaacgcttcgttattttcagcggattcagcagaccgggatatggcagaaccttagagccgtcagcaataaacgcgtgtttcccatatcatctgacccgtggattgaatattctccaagcggacatcagcggatgatcgagcaaagcatttccattttatccgaagatcgtccatggtaatgccggaaattatccatggtcttatccctgttcattctctataattccaattgataatagttatcaattgaacaggaggaacaatagatgaagaaattggcattcgctttcatgattttgcttttggctttcacggccgcggcttgcggaagctcagaaacatctgatacagcaagtaaaggaaaggacgcttcttcagataaaaagaaaatcgaatatctcggaaaaacatatgaagtcaaagcgccgactgacaaaatcgccattacaggcagcgtagaatcaatggaagacgccaaattgcttgacgttcatccggcaggggcaatttctttctccggcaaattcccggaactgtttaaagatattacagataaatccgtatctacgggagaaaaaatgcagccgaatatggaaaaaattcttgagctgcagccggacgtcattctggcatcaaccaaattcccggaaaaaacgttgaaaaaattgagcggcaccgctgaaacgatccctgtctctcatatctcatcaaactggaaagaaaacatgatgctgctcgcccagcttacagataaagagaaaaaagcgaaaaaaatcatcgcagattacgaacaggacctgaaacagacaaaaacaaagatcaacagcaaagcgaaacagtcaaacgcgctggtcatcagaatcagacaaggcaatatttatatttatcctgaacaagtatatttcaactccacgctttacggtgatttaggcctgaaggcgccggacgaagtcaaagcggcgaaagcgcaggaactgatttctcttgaaaaattaagcgaaatgaaccctgaccatatcttcgtacaattctctgatgacgaaaacgcagataagccggacgctttgaaagacttagagaaaaatccgatctggaagagcctgaaggcagtcaaaaaagaccatgtatacgtcaatacgattgatccattagcccaaggcggaaccgcgtggagtaaaatcagcttcttacaggttgcggctgacaaattgactcaagactaataaagagtaggtttttcacatgtatgcaaaacggcggacacacatgattatcattgcttcaccgattgccattgttctgtcactgctgctttccgttttatacggcgcaaagcagcttgacatccataccgtgttctccgcattgctgcactttaatccggagaataccgaccatcagatcatatggcattcaagaatcccgagggctgccggcgctatgtttatcggcgcagcccttgctgtttccggagcgctcatgcagggaatcacacggaactatctggcctcgccttcgatcatgggtgtgtcggacggctccgcttttatcatcaccctttgcatggtattgctccctcaatcgacatccattgaaatgatcatatactcgtttatcggttccgcattcggcgccgctcttgttttcgggctggcctccattcttcccggcggttttaccccggtgcagcttgccatcatcggaacggtgacaagtatgcttctcagcagtctgtcggctgcgctttcgatttattttcaaatttcgcaggatctcagtttttggtacagtgcgagactgcatcaaatgaaccctgattttttgaaactggccgtcccgttttttgcgatcggaatcatcacggccatgattctcagcaaaaaggtcactgccgtatcattaggagacgacatttcaaaaagtctgggacagcagaaaagaaccatcaaactcatggcgatggcggccgttgttatattgaccggaagctcggtggcactcgccggaaaaattgcctttgtcggtttggtcgttccgcacatcacacgttttctcgtcggatcggactacagcaggctgatcccatgcgcgtgcatcatcggcggcgtcttcctgactctttgcgaccttgccagccgattcatcaattatccctttgagacgcctattgaagttgtcacttctatcatcggtgttcctttctttctttatttgattaaaagaaaaggaggggatcagcgtggtgcgtaaaatggccggaatttatatcattctgattgctctcatattgctcgtaagctatttcagcatgacaagcggttctttttccgcaaagccgggtgaactgctcagtacgcttttccgcatccatccgaatccgcaatatgacattttgctgtttcagctgaggctgccgcgcattgtcatggctgctgccatcgggctcggattggggatagccggagccgttattcaggccattaccaaaaacggtcttgccgatcccggtattttgggcattaatgcaggagccggagccggaatcgtcacgtttatgcttctgtttcagggacaatctgaagcgacggcacttgcctctgcgatgggtatgcctgtcttcggcctcatcggaggattgatggcggccgtgctgatctatattttcgcctggcaccgggggcatctggaatcgggcagaattattctcgtcgggatcgccatgaattccggattcagcgcgctgtctttatttctttcattaaaaatggacccgcaggattatgagatggcgatggtttggaaaaacggcagtatctggtcggcaaactggatgaccattacggcgatccttccgtggctgatcgtgttcattcctctgcttatggcgaaaacgtcattgctggataccattcgtttcgatgaggacacggtgaaaagcctcggtgtttcaaccaataaagaaaaaacgattttactcattgcctgcatcgctttgatcagcgcatgtgtaaccgcagcgggcagcatggcatttgtcggactgatcgcgccccatatttcccgcaggctcgccgggattgagcacagatactcattaccggtcagcggattggtcggtatgctcctcgtcatatccgccgactttgcgggcaaattgttctttcagccttcagaagtgccggcgggaattattcttgcgattctcggcgttccttatttcttttttcttctgtttaagcaaaagaaggggctggatgcatgagaggcacccttacagaacaccggataaacggaaaggaatgcactgtgtatcttcctccctcctattcggttcaaacaggggctttaccctgtgtgtacgtactggacgggggttctttgtttttagaacagatggataaacttgaatcccaatttgcgaacggtacacttcccgaattgattttcatcggcatcaaaccggctgacaggctcgatgagtacacgccgtggcccgcgccttccctgagccctgcgtttcatgatttcggcggcaaagggaggctctttctcgaggagctgacaaatgtcatcattccaactgtagaagatatgcatcacatttctgcacatccggaaacaagaggcctgatcggcgcgtcattaggcggactgttttcgatatacgcgatgctgcaaaagcctgaaatattcggcagaatcggttgtatttccggttccttctggtatgaaaaatcagcagattatgtccgctccgcatctttgcgtccggcacgggggcgtatctatatgtctgtcggcagccgcgaagctgagcataaaaacaacatccaaaacaacatgatccgacaaaataaagacgtgcatgaaagcctgaggcaaaaaggcttttctcaatctcagctctctttcactgttgaagaaggcgccgtgcaccatcaagaagcattcaaacgacaattcaatgcagcactaagctggctgtacggaaaaaaccgctcacgtagctgagcggtttttttcatacttcatcacgaccggcttaagttcaaagcgtctcagcaaatagccgaacaaagcggcaaggatttgctgaaaaagcatcccgatgacgaccggaaccgccacttgagacggaaaaaaagaaacggcgagaacggctccggcgctgatattgcgcatgccccccgtataaatcagagacacaatttcatcctggctccgcttcatcagccttccgatcagccaagccacggcataacccgtcatggcaataaaaaataccatgcctgcgatgcccgcaaatttgatatccacgtgcgtgacatacggcgcgatttccgaactgttaatggcaatgacaatcatcagacagatttttgaaaaaggagacagcgaccggcttattgcctgagtccttaccggcggggaaaactggttgactatcatccctgcgatggatggaatcaccaccatctccgccagccctttcatcattccccacacatccatctgaacattcgccccggccaggacagacaggcttaacggtacgataaaaggagaaagcacggtatcaaccaggataatagacagcgtcaatccgacattccccttatacatcgcagcccaaatcaaactcgtaattccggtcggaatcaccacacccataatcagccccgtcacagttaaagggtcaccgctgaaaatcagatggccgcttccccatgcaaaaacaggcatgaaaatatgcagaacaaacaatgccatgatcatcggtagcggcttctcgatactgcgcttcagcgaatgaaaattggcactcagactgcccgtaaatgtaataaatgcaaatatccacggcacagcgccggccatccagctgatatgctgagataacagcacacccgccgccacacttgacggagtcaaaagcggcatgattctccccaacacttggttcaacttctgaagccacatcatatgcaagtctcctatatacggttttcaagtctcattcattataacaatgcaccccggcaaatttaaccgaaaaaaagcccggatatattcatccggacttcacaaattctatgccatttgtttcattaaatctcggcttttctgatttaatccctttaattcagcctcaattccgtattctttacatttggcgacaattttctcaagagccgccgctcccgaatcatcccacacgtgggcgtcggtcaaatcaatgacaatccgtttcacgtcttcatcataaacgatggcattcatgagctcagacacggaagcaaaaaagatctgtcccgttaccttataagttctgacatctttctgttcggaatgtgacacaatcttcagcttagaaattttcgccgtaaaaaagatcgcgcttagcagcacacccgcgaagacaccctttgataaatcatttgtcaggacgaccgtcatgacggtaataaccataacgatcgaatcagtaaggggcgctttccgcaaacctttaatcgatgaccagtcgaacgtgccgatggacaccataaccatcacggccaccagcgcagccatcggaattttcacgacgataccgcttaatacggcaattaaaaacattaaaaacgcgccggcggtaaaagccgataatcggccgcgtccgccggctttcgtattaatgacagactggccgatcatggcgcacccggccatgcctccgaaaaatccgttcacaatattggcgatgccttgtccgcggctttctttgttcttatcactatccgtatccgtcatttcatcaatgatctgggctgtcagcaatgactcgagcaatccgacgaaagcaagcgccagagaatacgggaaaataatccgcaatgtctcaaacgtccacggaacatccggtatcaagaaatgcggaagtgaacttgtaatcccgcccatatcaccgaccgtgcggacatccgcatggaagaccaccgcaatgatcgtcatgacaataatcgccaccagcggagacggcacagccgtcgtaaccttcggcaatagatatatgatagccagtgatccggcaagcatggcgtacatgacccatgaggctcctttgaactggggcagctgcgcagaaaaaatcaagatcgccaaagcattcacaaatccgatcatgaccgaacgcggaataaatttcatcaatttcgctatcttactgacaccaagaataaattgaataatacctgtcaaaatggttgccgcaaacaaatactgcagcccgtaatcagccaccaatgtcaccatgacaaccgccattgaacccgtagcggctgaaatcattcccggtctgccgccgaagatagaaataataatcgcgatacaaaatgatgcataaaggccgaccatcggatcgacacctgcaataattgaaaatccgatcgcctcggggatcagagcgagggcaaccagaataccggccagaatgtctttacggacattcccgaaccattgctgctgtaacgtataatctttcaaatgataacgactccttttcactataaaaatccgcaccctatcagttggaaacattgattttcatctggggaatatgaggcaagcttacggggaaaaagaggacacgctcagagtataatgtcgttgaggaaaggaattgtgaacaaagagtatcatattaaactttaaagaaatgtgcaagaccctataaataagaaaagaaaacgactctcactggagccgtttccgcttttataaaagttccggatcagacacaagaatcgtttttattgcgctgatatcctttctttcttttgtcaccgggtcgatgcccatgagatgatcaatggcttcttcataattcttcagttccgtcttttccgtaataagatcatagagctgcggaaggtcggacgcgcatgctaacgcggcttccatgatctggcgggcttcacctgtgcctacaatcgtcacgccgtttgacagcagctggtacggcctgaccgtcatctcatacgtatcatcaaagcccatcggcacgattctgcctcccttttcaataaaaggataagcccaatcaagctgattgccgattgcgtcaaaaatcacatcaaattttcttccttgattaatccgtttcacttcatccacggttaatgcttcagggtggtagacataatccgatatccggctcgccgcctcgcttcggaaactgcctatttcagtcgcaaccgtcaatcgcgccagttttttcaccatcatttgcacaagcagtccgatcggtcccgaccccaaaaccaagaccgagtcctccggctgaatcgaagccttgtccacaacattcagcacacaggagagaggctcaaccaatgtggcccgctcccattccattgaatccggaattctgtacatgaacctgtcttcccccacgtaatattccgcaaacgttccgtgcgccccgattccgagctgccaatcctcgaaggtttcgcaataacacgtcagccctctccggcaataatgacatttcccgcaaaactgcgtaggatctatcacgacgcggtctccgacttttacatttgtcacgtccggtccgatttccacgaccgctcccaccgattcatgccccataatcatatgatgggttgcattcatttttcctttcagcacatttaagtccgttccgcagataccggtgccgaaaattttcactttcacatcattggatttccgaatttgaggctcgtccacctcttgatattcaagcttatcattaggagtccagaccaacgccttcatatttctcttcctttctgccccagcggatttggtctaacaatgtttgatgaagctccttcgttgatgccgcaatacatgattgctgattctgataacttaaatctgtcagaagcgtttcgtccaaagaccggccgtacgcatccgtaatgaccactcccgccttcttcgccaaaaagacgcttgcggcaatatcataaggaaacaaatgcagcacctctccgttcccgacctgctgaaaatctgaaagcagcttcggatcatctttcagcagacgattgccgatatccacataagcatccatctgccccgtgataattcgtgaaatcgaataagaagcgctgttgaaaacaaaaaccccgccattattggccgactggtcaatcagatggccgtatgcgtccgtcatcagctgcgccggatgcccgttaaattcaaggctccaaaacatatttttaatatcccgcactccgctcaaattcggcaattctccatgatacccttcaaaatgaatggcatcgctgtatatatcaccgtacatataagcgcctgatttcaattcaagtaaaaaagcaaactcgatatccttaatctttgcgtttggcttatacgaagcaagcgcaatcgaaatacacgacatttcaagtcctgcggcggccgggcgcgttccgtctatcggatctacaattaaaatatattgcggatcttctccaatcagcttcaggccgccatcctccgtgtaaaaagcaaccggatggcccttttcttgaatataatccagcaccgcctcctcagcagcggcgtctatgttaaattgggcgtcgcctcccggagaatagccatttacgagccggtttttcagcgtgcctttttgatttttcaccttttgataaacaaattgtccaagctcaatgatatagtctctcacttgatttcctccaatagcttgcgaagtctgtagcagagcacttcggcttcactaagtgttatggttaaaggcggacggattttaaagacatttccgaatccgtaacgggatgtccggagaatcagcccgtaatccattgcccgttttgcaatataattggtcagctccacatccggttcattgttctctttaacaatctccacaccgatcataagaccgacgcctcttacctcagaaataaaagcgaaatcctctttcatcgtttctaagcgatccataatataatgaccgaccgtcgttacattttccaaaaatcccggtcgctgcatgatatctatggttttacaagcggcagcggcggccatcacatttgagccgtatgtgaaggagtgcgtataccccggaagcccggtatacttgtcctccgtcagagtggcggcgacttggaaacctgtgcccccgagcccctttgctaccgtcatcatattaggtttcacatcgaagtggtccgcggcaaacattttacccgtccgtccgaacccggtctgaatttcatcaaaaatcagagcgatatcatgttcatcacaaagctgtctcagctgtttaaaatactctttaggcggaacgacgtttccaccgtttccggatatcggttcaataatcatggcggcaatttttccattgctcgcatactcaataaaatcattaattctttctacgcacagcataccgcatgaatcaggtttctgattataaaaacagcggctgcaatagggatcggggacttgcaggccaaaagaaatttgcggcgggaaaggttcttttctgaatgagttgccggacaaagcggaagtcatatacgtttgtccgaggtggcttcgaaataaggagatgacatcggtttttccggagtaatactgagccattttaatagctccttcatttgcaccggaaccgctgctgactttagggtgtacttttgtgagattatcgggggcgatttctactagtttttctgccagtttatttacggcgtctgtttgaaaagatgatgttacatggatgagcttatcggcttgttctttaaccgtatcaatgacctctttgttaccgtatcctaaattcaagttaaacgtggcagaggcgcaatcaatgtactcatttccctcttgatcgtacaggtaaatcccttctccgcgctccattactacatcgtcaacactgtaatacaagctgtctggattcgtgatttccttcgttcccacaaataccacccctatgaaattattagaatttcgctttttatcgtataaattattgaaaataatgtcaacgatctttcttgtaaaaaatgttaacaatttgttaacgttaccataatggatgtacgagaaaaagttatgtgatatagtaacaatacttggattttttgtaaaaacatcatgtcatacgagtagagagaaatatgattttaccaataaggagataaaatgatgaaaactcgtctgctgtggataagctgtttttcttatggatcgattgcttttacacttgttattctgggagccgtactgcctgagttactcacacattattcacaaagctacagtaatggcggagtattggtattctctcagttcatgggctttctcatcggtgtcatcggaatgccatacatggtgaaaaagcttgggcgcaaaaacgtcgttatctttggcctggcactcatcagctgtgaaatgttcatcaccttcctgccgccctggccgctgctctttcttctcgtcagcatcgcagggcttggcgccggattggtggaatcctgtgtaggcacgatcatcctcaccgctattaaagaaagacaggctgtggccatgagcaagatggaagtggcctacggattaggtgcgctgttcatgcctctgctctcaggctttcttatcaacaaccacatgtggacaattgcttttttagtattagggttatccagttttgcactcttaatcgcatggaagcagatgagtttcggcagtattgatcagcttctcatccgcaaagaggtctcttccgatgacactaaaaaacaaagcaccggttatcggtcacacggattgctgtttattgccttggcgggtgcttacttcttcttttacggcggcagtgaagtttccattgtacattttatcccctccatcttcgctgagaaatgggatatccccaactctttggcaacgataacagttactgtgtattggacggggatgatcataggaagattattaacaggcccggtatcagaaaagctgacatatcaccgttatctccgtctcataagcattggcggtctggctgcacttactgtattagcattaagcaaaaacgtatggttcggttttgccctttgcttctttttagggctgttcatggcaggcatgtttgcaatagccctaatcatcacgaatcatttttatcccggaaagacagaaacgactaccagtattctgctcgcttcaaacggattaggaggttcactccttccgatcgccgtcggctggagcttagatgaatatcccgtacaaactgcgttctggctgtttactgcactgatgctccttatgctgctgattgtgttcagtttaagaatgctcgagacaataaaatcaaacaatcttcaacatcacaacagcaaagcaaaatcaatgtaaacaaaaaagctaatgcctttcaaaggcattagctttatatatctatgtgatctttcatataaaaaaccaagttcatcatgaacttggttaagatagcttggcggcgtcctactctcacagggggaaacccccgactaccatcggcgctgaagagcttaacttccgtgttcggcatgggaacgggtgtgacctcttcgctatcgccaccaaaccattgagagtgttctctcaaaactagataacagtaagcatacattcaaattggttaagtcctcgatcgattagtatctgtcagctccatgtgtcgccacacttccacctcagacctatcaacctgatcatctttcagggatcttacttccttgcggaatgggaaatctcatcttgaggggggcttcatgcttagatgctttcagcacttatcccgtccgcacatagctacccagcgatgcccttggcagaacaactggtacaccagcggtgcgtccatcccggtcctctcgtactaaggacagctcctctcaaatttcctgcgcccgcgacggatagggaccgaactgtctcacgacgttctgaacccagctcgcgtaccgctttaatgggcgaacagcccaacccttgggaccgactacagccccaggatgcgatgagccgacatcgaggtgccaaacctccccgtcgatgtggactcttgggggagataagcctgttatccccggggtagcttttatccgttgagcgatggcccttccatgcggaaccaccggatcactaagcccgactttcgtccctgctcgacttgtaggtctcgcagtcaagctcccttgtgcctttacactctgcgaatgatttccaaccattctgagggaacctttgggcgcctccgttaccttttaggaggcgaccgccccagtcaaactgcccacctgacactgtctccccgcccgataagggcggcgggttagaaggtcaatacagccagggtagtatcccaccgatgcctccaccgaagctggcgctccggtttccaaggctcctacctatcctgtacaagctgtaccaacattcaatatcaggctgcagtaaagctccacggggtctttccgtcctgtcgcgggtaacctgcatcttcacaggtactataatttcaccgagtctctcgttgagacagtgcccagatcgttgcgcctttcgtgcgggtcggaacttacccgacaaggaatttcgctaccttaggaccgttatagttacggccgccgtttactggggcttcaattcgcaccttcgcttacgctaagcgctcctcttaaccttccagcaccgggcaggcgtcagcccctatacttcgccttacggcttcgcagagacctgtgtttttgctaaacagtcgcctgggcctattcactgcggctctctcgggcttgcaccctaacagagcaccccttctcccgaagttacggggtcattttgccgagttccttaacgagagttctctcgatcaccttaggattctctcctcgcctacctgtgtcggtttgcggtacgggcacctctcacctcgctagaggcttttcttggcagtgtggaatcaggaacttcgctactataattcgctcgccatcacagctcagccttcacgggaaacggatttgcctatttcccagcctaactgcttggacgcggatatccaataccgcgcttaccctatcctcctgcgtccccccattgctcaaatggtgaggaggtggtacaggaatatcaacctgttgtccatcgcctacgcctttcggcctcggcttaggtcccgactaaccctgagcggacgagccttcctcaggaaaccttaggcattcggtggaggggattctcacccctctttcgctactcataccggcattctcacttctaagcgctccacaagtccttccggtcttgcttcacagcccttagaacgctctcctaccactgttcgaagaacagtccgcagcttcggtgatacgtttagccccggtacattttcggcgcagagtcactcgaccagtgagctattacgcactctttaaatggtggctgcttctaagccaacatcctggttgtctaagcaactccacatccttttccacttaacgtatactttgggaccttagctggcggtctgggctgtttccctttcgactacggatcttatcactcgcagtctgactcccaaggataagtcatcggcattcggagtttgactgaattcggtaacccggtaggggcccctagtccaatcagtgctctacctccgagactcttaccttgaggctagccctaaagctatttcggagagaaccagctatctccaggttcgattggcatttcacccctacccacacctcatccccgcacttttcaacgtgcgtgggttcgggcctccattcagtgttacctgaacttcaccctggacatgggtagatcacctggtttcgggtctacgaccacgtactcaattcgccctattcagactcgctttcgctgcggctccgcatcttctgcttaaccttgcacgggatcgtaactcgccggttcattctacaaaaggcacgccatcacccgttaacgggctctgactacttgtaggcacacggtttcaggatctctttcactccccttccggggtgcttttcacctttccctcacggtactggttcactatcggtcactagggagtatttagccttgggagatggtcctcccggattccgacggaatttcacgtgttccgccgtactcaggatccactcaggagagaacgaagttttgactacagggctgttacctcctatggcgggcctttccagacctcttcatctacctcgttcctttgtaactccgtacagagtgtcctacaaccccaagaggcaagcctcttggtttgggctggtcccgtttcgctcgccgctactcagggaatcgcatttgctttctcttcctccgggtacttagatgtttcagttccccgggtctgccttctcatatcctatgtattcagatatggataccactccattacgagtggtgggtttccccattcggaaatctccggatcaaagcttgcttacagctccccgaagcatatcggtgttcgtcccgtccttcatcggctcctagtgccaaggcatccaccgtgcgccctttctaacttaaccgttaaaaagaatcactacgtgatatcttgcattactaattgaatgtgaattacttctgttatctagttttcaaagaacaacgcataggacatgctaacacatgcgttgccacaggaagtggcgcatttagcaggtgttcctatgttttgaaggaatgatccttcaaaactaaacaagacagggaacgttctgtttataagacccaaggtcttatattccgttaaaatccttagaaaggaggtgatccagccgcaccttccgatacggctaccttgttacgacttcaccccaatcatctgtcccaccttcggcggctggctcctaaaaggttacctcaccgacttcgggtgttacaaactctcgtggtgtgacgggcggtgtgtacaaggcccgggaacgtattcaccgcggcatgctgatccgcgattactagcgattccagcttcacgcagtcgagttgcagactgcgatccgaactgagaacagatttgtgggattggcttaacctcgcggtttcgctgccctttgttctgtccattgtagcacgtgtgtagcccaggtcataaggggcatgatgatttgacgtcatccccaccttcctccggtttgtcaccggcagtcaccttagagtgcccaactgaatgctggcaactaagatcaagggttgcgctcgttgcgggacttaacccaacatctcacgacacgagctgacgacaaccatgcaccacctgtcactctgcccccgaaggggacgtcctatctctaggattgtcagaggatgtcaagacctggtaaggttcttcgcgttgcttcgaattaaaccacatgctccaccgcttgtgcgggcccccgtcaattcctttgagtttcagtcttgcgaccgtactccccaggcggagtgcttaatgcgttagctgcagcactaaggggcggaaaccccctaacacttagcactcatcgtttacggcgtggactaccagggtatctaatcctgttcgctccccacgctttcgctcctcagcgtcagttacagaccagagagtcgccttcgccactggtgttcctccacatctctacgcatttcaccgctacacgtggaattccactctcctcttctgcactcaagttccccagtttccaatgaccctccccggttgagccgggggctttcacatcagacttaagaaaccgcctgcgagccctttacgcccaataattccggacaacgcttgccacctacgtattaccgcggctgctggcacgtagttagccgtggctttctggttaggtaccgtcaaggtgccgccctatttgaacggcacttgttcttccctaacaacagagctttacgatccgaaaaccttcatcactcacgcggcgttgctccgtcagactttcgtccattgcggaagattccctactgctgcctcccgtaggagtctgggccgtgtctcagtcccagtgtggccgatcaccctctcaggtcggctacgcatcgtcgccttggtgagccgttacctcaccaactagctaatgcgccgcgggtccatctgtaagtggtagccgaagccaccttttatgtctgaaccatgcggttcagacaaccatccggtattagccccggtttcccggagttatcccagtcttacaggcaggttacccacgtgttactcacccgtccgccgctaacatcagggagcaagctcccatctgtccgctcgacttgcatgtattaggcacgccgccagcgttcgtcctgagccaggatcaaactctccgataaagtagtttgactgactacgcacatcgctgtgcgatttatttaaaactttgaattaacaggtacgttttgtcttgtttagttttcaaagatcattaccgcttgttgaagcagctttattatcttaccactcagcttcttttatgtcaacaactttttttacgttgttcccgaagctttttgttgttgtctgctgttcatcagcgacgtttaataatataccacggtgtctctctataaatcaagcatttttttaaaaaaggagaaaaaaagaaaaccagtatattatctttaaagtttgagaatggtcgggaagacaggattcgaacctgcgaccccatggtcccaaaccatgtgctctaccaagctgagctacttcccgatttttaaatatattatggcgcgcccgagaggagtcgaacccctaaccttttgatccgtagtcaaacgctctatccaattgagctacgggcgcaatcaatttcacaatatcccgttgggataaaatggagcggaagacgggattcgaacccgcgacccccaccttggcaaggtgatgttctaccactgaactacttccgcaagtaaaaatgtaatgtacagccagaatacagcatcagataacccaaaaactgtattgttatttattcagtaaaactccaaacggtataacccgcagattaatctaaagcatactgttcattatgacaaaagtaattatatcaaggttttgataaaagtcaataccgtttaacaattaattatgttaatctcttttgcatccttaaagaaaggcttcatcagaagacgcgctaaatacctataccttaactgatacaatcagcaacagatttttactgaactaaacaaaaaataacagtcccataacaagcggaaactgcttcagatcaacgtatttagataagcttccaagcgggctcgaaccgctgacctcttccttaccatggaagtgctctacctgctgagctatggaagcaatggctccgcaggtaggactcgaacctacgaccgatcggttaacagccgatagctctaccactgagctactgcggaatattataagcttcataaacaaaaacatggtagataaaataaaaagcttggcggcgtcctactctcacagggggaaacccccgactaccatcggcgctgaagagcttaacttccgtgttcggcatgggaacgggtgtgacctcttcgctatcgccaccaaaccattgagagtgttctctcaaaactagataacagtaagcatacattcaaattggttaagtcctcgatcgattagtatctgtcagctccatgtgtcgccacacttccacctcagacctatcaacctgatcatctttcagggatcttacttccttgcggaatgggaaatctcatcttgaggggggcttcatgcttagatgctttcagcacttatcccgtccgcacatagctacccagcgatgcccttggcagaacaactggtacaccagcggtgcgtccatcccggtcctctcgtactaaggacagctcctctcaaatttcctgcgcccgcgacggatagggaccgaactgtctcacgacgttctgaacccagctcgcgtaccgctttaatgggcgaacagcccaacccttgggaccgactacagccccaggatgcgatgagccgacatcgaggtgccaaacctccccgtcgatgtggactcttgggggagataagcctgttatccccggggtagcttttatccgttgagcgatggcccttccatgcggaaccaccggatcactaagcccgactttcgtccctgctcgacttgtaggtctcgcagtcaagctcccttgtgcctttacactctgcgaatgatttccaaccattctgagggaacctttgggcgcctccgttaccttttaggaggcgaccgccccagtcaaactgcccacctgacactgtctccccgcccgataagggcggcgggttagaaggtcaatacagccagggtagtatcccaccgatgcctccaccgaagctggcgctccggtttccaaggctcctacctatcctgtacaagctgtaccaacattcaatatcaggctgcagtaaagctccacggggtctttccgtcctgtcgcgggtaacctgcatcttcacaggtactataatttcaccgagtctctcgttgagacagtgcccagatcgttgcgcctttcgtgcgggtcggaacttacccgacaaggaatttcgctaccttaggaccgttatagttacggccgccgtttactggggcttcaattcgcaccttcgcttacgctaagcgctcctcttaaccttccagcaccgggcaggcgtcagcccctatacttcgccttacggcttcgcagagacctgtgtttttgctaaacagtcgcctgggcctattcactgcggctctctcgggcttgcaccctaacagagcaccccttctcccgaagttacggggtcattttgccgagttccttaacgagagttctctcgatcaccttaggattctctcctcgcctacctgtgtcggtttgcggtacgggcacctctcacctcgctagaggcttttcttggcagtgtggaatcaggaacttcgctactataattcgctcgccatcacagctcagccttcacgggaaacggatttgcctatttcccagcctaactgcttggacgcggatatccaataccgcgcttaccctatcctcctgcgtccccccattgctcaaatggtgaggaggtggtacaggaatatcaacctgttgtccatcgcctacgcctttcggcctcggcttaggtcccgactaaccctgagcggacgagccttcctcaggaaaccttaggcattcggtggaggggattctcacccctctttcgctactcataccggcattctcacttctaagcgctccacaagtccttccggtcttgcttcacagcccttagaacgctctcctaccactgttcgaagaacagtccgcagcttcggtgatacgtttagccccggtacattttcggcgcagagtcactcgaccagtgagctattacgcactctttaaatggtggctgcttctaagccaacatcctggttgtctaagcaactccacatccttttccacttaacgtatactttgggaccttagctggcggtctgggctgtttccctttcgactacggatcttatcactcgcagtctgactcccaaggataagtcatcggcattcggagtttgactgaattcggtaacccggtaggggcccctagtccaatcagtgctctacctccgagactcttaccttgaggctagccctaaagctatttcggagagaaccagctatctccaggttcgattggcatttcacccctacccacacctcatccccgcacttttcaacgtgcgtgggttcgggcctccattcagtgttacctgaacttcaccctggacatgggtagatcacctggtttcgggtctacgaccacgtactcaattcgccctattcagactcgctttcgctgcggctccgcatcttctgcttaaccttgcacgggatcgtaactcgccggttcattctacaaaaggcacgccatcacccgttaacgggctctgactacttgtaggcacacggtttcaggatctctttcactccccttccggggtgcttttcacctttccctcacggtactggttcactatcggtcactagggagtatttagccttgggagatggtcctcccggattccgacggaatttcacgtgttccgccgtactcaggatccactcaggagagaacgaagttttgactacagggctgttacctcctatggcgggcctttccagacctcttcatctacctcgttcctttgtaactccgtacagagtgtcctacaaccccaagaggcaagcctcttggtttgggctggtcccgtttcgctcgccgctactcagggaatcgcatttgctttctcttcctccgggtacttagatgtttcagttccccgggtctgccttctcatatcctatgtattcagatatggataccactccattacgagtggtgggtttccccattcggaaatctccggatcaaagcttgcttacagctccccgaagcatatcggtgttcgtcccgtccttcatcggctcctagtgccaaggcatccaccgtgcgccctttctaacttaaccgttaaaaagaatcactacgtgatatcttgcattactaattgaatgtgaattacttctgttatctagttttcaaagaacaacgcataggacatgctaacacatgcgttgccacaggaagtggcgcatttagcaggtgttcctatgttttgaaggaatgatccttcaaaactaaacaagacagggaacgttctgtttataagacccaaggtcttatattccgttaaaatccttagaaaggaggtgatccagccgcaccttccgatacggctaccttgttacgacttcaccccaatcatctgtcccaccttcggcggctggctcctaaaaggttacctcaccgacttcgggtgttacaaactctcgtggtgtgacgggcggtgtgtacaaggcccgggaacgtattcaccgcggcatgctgatccgcgattactagcgattccagcttcacgcagtcgagttgcagactgcgatccgaactgagaacagatttgtgggattggcttaacctcgcggtttcgctgccctttgttctgtccattgtagcacgtgtgtagcccaggtcataaggggcatgatgatttgacgtcatccccaccttcctccggtttgtcaccggcagtcaccttagagtgcccaactgaatgctggcaactaagatcaagggttgcgctcgttgcgggacttaacccaacatctcacgacacgagctgacgacaaccatgcaccacctgtcactctgcccccgaaggggacgtcctatctctaggattgtcagaggatgtcaagacctggtaaggttcttcgcgttgcttcgaattaaaccacatgctccaccgcttgtgcgggcccccgtcaattcctttgagtttcagtcttgcgaccgtactccccaggcggagtgcttaatgcgttagctgcagcactaaggggcggaaaccccctaacacttagcactcatcgtttacggcgtggactaccagggtatctaatcctgttcgctccccacgctttcgctcctcagcgtcagttacagaccagagagtcgccttcgccactggtgttcctccacatctctacgcatttcaccgctacacgtggaattccactctcctcttctgcactcaagttccccagtttccaatgaccctccccggttgagccgggggctttcacatcagacttaagaaaccgcctgcgagccctttacgcccaataattccggacaacgcttgccacctacgtattaccgcggctgctggcacgtagttagccgtggctttctggttaggtaccgtcaaggtgccgccctatttgaacggcacttgttcttccctaacaacagagctttacgatccgaaaaccttcatcactcacgcggcgttgctccgtcagactttcgtccattgcggaagattccctactgctgcctcccgtaggagtctgggccgtgtctcagtcccagtgtggccgatcaccctctcaggtcggctacgcatcgtcgccttggtgagccgttacctcaccaactagctaatgcgccgcgggtccatctgtaagtggtagccgaagccaccttttatgtctgaaccatgcggttcaaacaaccatccggtattagccccggtttcccggagttatcccagtcttacaggcaggttacccacgtgttactcacccgtccgccgctaacatcagggagcaagctcccatctgtccgctcgacttgcatgtattaggcacgccgccagcgttcgtcctgagccaggatcaaactctccgataaagtagtttgactgactacgcacatcgctgtgcgatttatttaaaactttgaattaacaggtacgttttgtcttgtttagttttcaaagatcattaccgcttgttgaagcagctttattatcttaccactcagcttcttttatgtcaacaactttttttacgttgtttccgaagctttttgttgttgtctgctgttcatcagcgacgtttaataatataccatgcattctttaaatttagcaagtgtttttttcgttttttttaaaacgtatttcgttatattcatctccgccgcggcatacgatgtaatcaagcatggacaagataaggaggcgtcatcagtgaatcacttctacgtgtggcacatcagaaggataaaacagctgcttattattatcattgccgcatttgcagcagccagctttttttatatacagagagccgtcccccttcctgtatttttaactgatagcggcccaaaggctatttcaaaaggggagacgagagcgggggaagtcgcattaacattcgatatcagctggggcgatgaaaaggcggttccgattctgaacgcgctaaaagcaaacggtattaaaaacgctactttttttctgtcagcttcttgggcggaacggcacccggacacagttgaacgtatggtaaaagacggacatcaaatcggcagcatgggatatgcgtataagaattataccaacctagaggacaatgaaataaaaaaagatatcctccgggcccagaccgcatttaaaaagctgggtgtgaagaatgttcatttactccgcccgccgaccggacaatttaataaaaaggttcttaccattgcacagcagtaccactattcagtggttcattacagcgttaactcgcaggattggacaaatcccggccctgataaaatcattgaaaatgtaaacagtcatataaaaggcggcgacattgtcctgctgcacgcatctgattcagcaacacagactgaagaagcgctccccgccatcattcacaatttaaagcaaaaaggactgaaaaacgtgaccgtcggcgacctgatcgcaaatactgacgtcaagtcatcagaagtgaaataattacctctgggcaaacttcggcagcattaacagctgaaacgcattgcagcccatcagcggaatcagcatcaaataaagccagtcctcattattcactcgtagcgcaggaacccattcaagcgctgtaataacgaccattaaaaataatgatgaaacgaacgtattttttgaggactgcttttgttttatatacgccgtcaacaggccgacggcaagcagagccagcggcagccagacaaaccccgcaatcgagtcatcccgctctccgaaaaacaaaaatctgacgtacattaaatcaaaagcgacaaacagaatgataaacagctgaagcagattccaaagcgagcttgatctgagaatttcaagggcaaaccggtgcaccgtcagaaaaacgaagaatcccatctggctgatcacactgaaaatcatgcccaccccgataaaccagatcagaacggagaaaatctgaccggcctcaaaattcagaaagaaccccttgtactccccccacttcagagcaaatcccacgacgcttgtaataagagcgcccacagctaaaatcgaaaagaaaaatcgaacaagcccgcggcttttcatctcttattcatccccctgacaatcgcgttcagcgatattttgttatgtataaatccattccgatgaatcatattaaaaataagtacaagtaaggaaggagcttatgcatgtcaaaagccaaaacgctattgataagctgttttgttttattatctgtaacagcttgtgctccaaaagaccaagcagcggatatggattatgaccagactaaaaaaatggttgttgatatattaaagaccgatgatggaaaaaaggcaattaaggaaatattaaatgatgatgcgatgaatgaggcattggtgattgatcaaaatgccattaaaggcacaatagagaaaaccctcacctctaaaaaaggggcggagttctggaaaaccatttttgaagactcaaaattcgccgagagctttgcaaaaactcttcagcccgagcatgaaaaaatcataaaaaaactgatgaaagaccctgattatcagaaaagttttatgcagatcatgcaggaccccggcatggataaaaaatactatgagctggtgaaaagccaaaagttccgcagttacttagaagatgtaattacagagacactttccagcccgcttttcaaaaagcaattcgaggatgaattgaaaaaagcagcttcaagctctgaaaaagaaagccaataaaaggccgggccgtgttgatcccggccccttttttattcagctgttttttcaatgactttctgggcgatccccatataaatttccccgatcggatgacttctgtcatagacagaaggcgcaaactgatccttgtcccaatcaggctgttttaaaggaattctgccaagcagcggcacttgcaattcctctgcaagcttatctcccccgccttgaccgaacacatattctctctcgccggtttttgcactttcatagtaagccatattttcaatgacccctacaacttcatgatcggtcttaatcgccatagaacccgctctcgccgctacaaatgcggctgtagggtgcggcgttgatacgataatctctttgcagctcggaagcatcgtgtgtacatcgagcgccacatcaccagtgccgggcggcagatcaagaacgatatagtcaacctctccccagtcaacttcatggaagaagttattcagcatcttgcccagcatcggccctctccacacaaccggagcgttttcttcgacgaaaaagcccatcgacataacctttactccaaatctttcgacaggaagcagtttttctccttctactgtcgggcgaactgtaatacccatcatgtccggcacgctgaatccgtatatatccgcatcgatcaagccgactttttttccgagccgcgcaagagaaatggccaggttgacggaaaccgttgatttgccgacaccgccttttccgcttgccaccgcaagaaagaccggcggatgtttcctattcagcagggtttcgctttcagcagccggccggctgaatttcgccaatgtttcttccggcagctcttcaaaccgcagtcccacagtttccgcacccgcttctttcagaacggatacgatttcctgctgaatacccatctgttcagccgtccccgtttttgccaatgcaattttcacactgacatgccgtttttccggcttgatctttacttctttaatggcatccaattctcccagcggtctatgaagaaaaggttcgcgcatgtttccgactatatttcttacttcatcttctcttatcatcgaaccctcaccctttgtgtattcgtttacaaatggtattataccatatattaaacatagaatcggcgaaaaaccctccttactcgggagggtctcctttctctgtgaagtatctcaatacgcccttatacacggaagaagcgattttgtcctgatatttgggctggccgagccttttcgcttccgcgggattggacagaaatccgatctccaccagcgcgcccggtttggttacattctgcattaagtaaatgccgtgtatccgtttcgcctttctcgttgtattctccaaattgattctcaattcgtcctgtatatattttgccactttttcattttcttcgtattttccatagtagaagctttgggcgccgctccatctcggtgacggtatggcgttcagatgaatgctgatataaagctccgcctctgaacggttgatgatttccacgcgctttctcagatcttccgctttgcgtctgctgtagcctttcgtcccttcaggagctaaatcagtatccgtctcccgcgtcataatgaccaaagctccctgctcctgcaaatagtctctgaccctggaggccacttcgagagtaatgtccttttcaaggtgactgcctcccgtggcgcctccgtccggcccgccgtgtcccggatcgagatagatgattttcccgctcagcggcagactccacggccgccaggaatcatcattatggaattgaaaccggaataaacacaataatatgataaagccaagtaaaaaaccgagccatttcagcttttttgtcatacctttccctcccgcttgtccccgttattaataagtatgggacaagggaagaaattatgattacctcatgcggagcttacattgtttttctctttgcagaaatccttccgtccaccagctgttgataaaccggcaggacgcttcatagatttctttttgttcaacggaagaatattgctcatgcgtccaattgcaaagatattcaaaaaaatcgaccgtcagttcttcctcttcttcagccgaacgggcgtttgccctctgcaaggactcaccataatagccaaagacgccgaaccggccgcctaataaatacgcttcaattgcaaaatctatgcatccttcactcagaatgccgttttcgtcttgaagaaagggaaacaaaggggtaagacatgcttttacggactgaatgatctgcgtcagtgacagctcctttagtaaactcttctcaagctcaaaatccttctgccgtttcacgtctgaaaaagataatacttctgccattgccagccacgctcctttttactgttattttgaaaggaaaagggaaaaagcatgctttgttgatagtggaaatcctcccaaatgaaggagttttatgttaactggaagaagaaagagctgaggtgacgtgatgaaaaagctgtttcaatacaattggacggtgcgtgacgagtggtttatgatatgtgaaaagctgagccgggaggaactgacgaaaacccggacgggcggaatggagagcatcttgcggactttatttcatatcattgatgtcgagatcagctgggctcgtgccattttaggtaaagatgatgttttacctgctgagtctgactatacaagcattcaggatctcagaaagctgtctgaacagtatcgggaggatgtcattcatgcggtctccctcaaaggaccggatcttgttaagccggactggatggaccaaacctttcctaaagaagatattctccgccacatccttgcgcatgagattcaccatatgggacaactgtcggtttgggccagagacattggaatagaaccggtttcggctaatgtgatcagccgtccgcaggaaaaagccgcaaaaaaacagcacctctgacgggatgccgtttttatattttaatgcttcttgttacggagtatgtattaatgtattcatccagcacgaggccgcctttgtcctcgtaaaaaccggcaaccatgaagcctgcgtcaatctgacctttaatttgatcctccagcgtatggccgaattcaagcgcttcatgattatcaataagttcctttacctttttcttactcagatctttttcatccgaaaacggaatggaatactttacttttagtacgccttcctgctctaaatccatatcaaataagaacacgacgggatttacaaaaccggagactaaagacccgccttttttcaatacgcgatgagcttctttccataccggaagaaccgtatcaacaaagcaattcgataccgggtgcacgataaaatcaaatgactcatcatcaaaacagctcagatcattcatgctgcctttgacagtccgaagcgtaagatcgtcccgcccggcaaccattctgtcttgcgcaagctgtttttccgaattgtcaaagatggtcacatccgctcctgcagcagcaaggaccggcccttgctgtcctcctcctgaagcgagacaaagaaccttcagaccgtctatgggcggaaaccaatcagccggcacatcttttccgggggtcattctgatgctccaattgccttttttcgcttcaccaatcgtatgagaatcaaccgcaaccgtccattcattgcctgtttcgacttttttatcccatgccttgctgttatgtatgactaacttattcattataactgcgctccttattggtaatgaatagagtataacaaacaattctagaaaaacatcggataacctcttgaatatgagaaaaaaatacaaaaaaaccacaaccaaaaagttgtggtttttgccatccaaaacgattaacgttttgagaactgaggtgcacgacgagcgcctttaagaccgtattttttacgttctttcatacgagcgtcacgagtcagaagaccagcacgtttaagtgttgcacggtattctggatctgcttcaagcaaagcacgagcgataccatgacggattgctccagcttgaccagataagccgcctccatgtacgtttactaaaacatcataagtaccagctgtttcagttaaagttaatggttgtttgatatcttcgattagagctggagatggaatgtgctcgctgatttcacgattattaacgacgatacgaccttcacctggaactaagcgcacacgcgctacagaacttttacgacggccagtaccgtaatattgaacctgtgccaaattggtaacctcctttttaattaaccgcgaagttcgtaaacttcaggtttttgtgcttcatgtggatgctcagaaccacggtatacgttcaatttcttgaacatttgacgacctagagaaccttttggaagcatgcctttgatagcaagctcaagcattttctcagggtagtttgtacgcatttcaagagcagttcttgattttaatccgcctggatgttgagtgtgacggtagtagattttgtcagttaactttttaccagttaactcgattttttcagcgttgatgatgatcacatgatctccagtatcaacgtgcggtgtgtaagtcggtttgtgtttcccgcgaaggatagatgcaacttctgtagaaagacgtcctaaagtcttgccagcagcatcaacaactaaccacttgcgttcaatagtacttgcgttagccataggtgttgtacgcattgaatttccctcctaaatgatctgtcattttcaataatcttcgattacgttctatttcacaacacaataagttccggggcttatcgtggggttgaaatacataccatatgatatcttataactttatgcagactctgtcaagaaaatgttacacctggtttagttgtcatagcaaacgctccataaatacagcccgtgccccggtgcggtgcgccccgcggcttcacgatccttcgcttcgagcattgcttttacatcatcgggagaaaattttccagctcctgtatccaataacgttccggcaatgattctgaccatattatagagaaaaccgtttccggtgatccgcatctgcaggccgtctccggtctcagtccaatccagctcgtaaattgttctgactttatcctgaaccgcggtatcagccgcgcaaaagcttgtgaaatcatgtgtcccgacgaggtgccttgaagcttccctcattttctgcacattaagcggatatgcaaaatggtaagcgtaatgtcgtttaaatacgtccgggtgtttctccgtatatacaaagtagcgatattccttttggaccgcgctaaatcgtgcatggaacccatcatccgcaatctctgctgttttgacggcaatatcatcaggcagcagggcattgagcgcaaacggccatttctcagccgggatggacagcggcgtatcaaaatgaatgacctgcccggcagcatgaacatcgctgtccgtgcggccggatgagatgacaggcactctgccgtccgttttatggatgacggccagcgctttttccaattcactttgaacggtccgctttccaggctgaacctgatatccgttaaataaatgcccgtcataagcaatggtacatttcactctcattcagcagcacctctaacttcttaagaaaaacaataacacggctaataccatgatgagcagaatagctccggtatcctttccggtccagacgagctttctgtatttcgttctcccctcaccgccctggtagcctctcgcctccatggcgaccgcgagctcttccgcgcgtttaaaggcgctgacaaacagcgggacaagcagcggaacaaccgctttgattctgtctttcaccgggccgcttgtaaagtccgcacccctcgccatttgcgccttcatgattttatctgtctcttccatcaatgtcgggataaatcgcaatgatatcgacatcatcaatgcgagttcgtgtacgggcagcttcacctttttaaaaggattcaggagctgctccattccatccgttatttcaatcggcgttgttgtcagcgtcagcagcgtcgtcataaagataaggtaaacgaaacggagggagataaaaataccctgtataagtccgccctcatacactttaaaccagccaagctgaaaaatgacagatccttcatgcgtcatgaaaatgtgtaataaaaaggtaaacgccacaatccagataatcggcttaagccccttcagcaaaaagctgaacggcacgcgagtcaaggcgatcaccccgaatgtaaacaaaccgagcaaagcatacgtctgtacgttgtttgccaaaaagacgatacatacaaaaagaaaaatgctgacaagttttgttcgcgggtccaatcggtgaataagcgatgatccgggaacatactttccgataatcatgctgtccatcattggtccttttcctcctgaaagaaagccttaatttcactggcggcatcctgcagggtcagcatgggtttttcacacttgactccgagagccttctcaagccgtctctgaaacttcaccgattcaggaagatccagtcccatttcggccatctcttcaccttttacaaacaagtcacgcggactccccgtcgctttaatggttcctttgtgcatgacaatcatttcgtcagcatagcgggcggcgtcctccatgctgtgggtgacgagaacggtagtcaggtttccccgctgatgaagcgcatagaacatgtccataatgtcctggcgccctctcggatcaagaccggccgtcggttcatccaaaaccagcacttccggctccatcgcgagaacgccggcaatcgccactctgcgcatctggccgccgctgagctcaaatggtgaacgatccaaaatgtcttccggaaggcccacaagccccagcatttcttttgctttccgttcagcgtcttctttttttacaccaaaattcatcggtccgaatgcgatgtccttcagcacagtctcttcaaacagctgatgttcgggaaattggaaaacgattccgactttttttcgcaaagtcttaaggtctttattctttttaccggctgccagaatcgtactcccgagttcaaactgtcctttagtcggtttcagcaaaccgtttaaatgctgcaggagcgtcgatttgcccgaccctgtatgcccgatgacggcaacgtagctgccctcttttatcacggcattgatatcatacagagccagccgttcaaacggtgtcttcatttgatagcggtgttctacatctttgattttaatgtccacagctcattcaccagcccttcctgagtcagatggtttttcgttaacgccagtccgctttctttcaaaagcaggctgagctggaatgagaaaggcaaatcaagaccgatgcgaaccaagtcttcgtttaatttaaaaatctcttcaggcgtgccctctgcatatttcctgccgccgttcatcacaatgatcctgtccgcccttgcggcttcttccaggtcatgtgttatcgaaatgacggtggccatgccctgatcttttaagcgtctgacagtatcaaggacttcttctctcccaatcgggtcaagcatggatgtcgcttcatccaaaatcataatatcaggacgcgcggcaataatccccgcgatcgccactctttgtttttgacctccggagagatggtgcggctcttgatcaagaaaatcctgcatattgacttgtgtgacagcccaatctactctctcaatcatttcttcgcgcggaacaccattgttttctaaaccaaaagccacatcatcgcgaacagtcgttccgacaaattggttatcgggattctgaaagaccatccctattttttttcgcacatcccacacggtatcctcagtcagtttgatgccgccgacttcaatttctccggcctcgggcaaaatcagcccgttcagcgctctggccaaagtcgacttccctgaaccgttgtggcctacgatagcaagccattctccttcgtatacctccagactcacaccgtccagcgccggtctttctgcatctttgcggtaacggaatagaatgtcttttacggatataagctgtttttgatccacgggcgcctgacctcctctcagctatagctctgcttttctgtctcatgatcaaaagttctgatatctaaaaaaagggcatagatccagttagaaactgtcccgcccttctttagatacacaaaaatatgtgattaaaccaattcgatgattgccattggtgcaccgtcaccacggcgaggaccaagcttcataatacgtgtgtatccgccttggcgctcctcgtaacgagttgcaatgtcagagaataatttttgaagtgcatcttggttattttcttcattagcaacctcgttgcgaatgtatgcagctgcttgacgacgagcatgcaagtcaccgcgcttaccaagagtgatcatcttttcaacaacagagcgaagttctttcgcacgtgtttcagttgtttcaattctttcgttgatgatcaaatctgttgtaagatcacgaagcatagctttacgctgtgaactcgtacgtcctagttttctgtatgacatgtgatgtcccctcctttaatggaatgctgtttctaaataaaaaacacacgaaaatcctagttcacatggaaactagatcaatcgtctttgcgaaggccgagtccaagttcttctagtttcgctttcacttcttcaagtgatttgcgtcccaggttgcgaactttcatcatatcttcttccgtcttgttcgcaagttcttgaaccgtgttaatgcccgcacgcttcaagcagttgtaagaacggacagaaaggtcaagttcctcaatcgtcatttcaagaactttttctttttgatcctcttctttttcaaccatgatttcagcatgctgagcttcgtcagttaaaccgacgaatatattaaggtgttcagttaaaatctttgaaccgagagcaattgcttccttcggtccagtgcttccgtcagtccaaacatcaagtgtaagtttgtcatagtttgcaacctggcctacacgagtgttttctacctgataagataaacgagaaactggcgtaaagattgaatcgatcggaatcacgccgattggctgatcgtctcttttgttcgaatcagcaggtgtatacccacgtcctctttgtgcagtaaggcgaactcggaaactcgcattctcaccaagagtcgcaatatgaagatctggattaaggatttcaacatcgctgtcgtgtgtaatatcagctgctgtgacagttccttcgccctgtacatcaatttcaagcgtcttctcttcatcagagtagattttcaatgcaagctttttaatgtgcaagattatcgttgtaacatcttccacaacgccttcgattgtcgagaattcgtgcagtacaccatctatctggatcgatgttacagcggcaccagggagtgaggataagaggatacgacgtaaggagttacccagagttgtaccatatccacgctcaagcggctctacgacaaacttaccaaatttggcatcgtcgctgatttcaaccgtttcgatttttggtttttcaatctcgatcattacttaaaaccctccttcaaaacgtcgaaacctcgaatagaatcatatgagattccatccgaaattccccattgtttagtcccgtatgtgctcaggcaacgagtcggtgcattcgtttcataaataactgtatcataacccattattgacagggacacaaaatctatacaaacaaattacacgcggcgacgttttggtggacggcatccattatgaggaacaggagttacgtctctgatagctgtaacttcaagtccggcagcttgtaaagcacggattgcagcttcacggccagaacctggtcctttaacagttacttcaagagttttaagtccgtgttcgattgaacctttagcagctgtttcagcagccatttgcgcagcaaaaggagtagatttacgagaacctctgaatcctagagctccggcacttgaccaagaaagagcattaccatgagtatcagtgatcgtaacgatcgtgttgttgaaagttgaacgaatatgagcgattcctgactcaatattctttttcacgcgacgtttacgcgtgttttgtttacgagcagcagccattgtttaggtacctcccttacttattttttcttgttagctacagtacgacgcggacctttacgagtacgcgcattgtttttagagttttgtccgcgaacaggcaaacctctgcgatggcggattccgcggtagcttccgatttcgatcagacgcttgatgttaagagaaacttcacggcgaaggtcaccttctactttcagtttgtcaataacatcacggattttaccaagttcttcttcagtaagatcacgcacacgagtatcttcagaaacaccagcctctttcaagacttgctgagccgttgtgcggccaattccgaagacatatgttaaagaaataacaacacgtttgtcacgtgggatatctacaccagcaatacgagccattctctgggcacctccttattaattatccttgtttttgtttatgctttggattttcacagatcaccattacttttccttttctgcgaataactttacatttctcgcagattggtttaactgatggtctcactttcatgtgtttccaacctccttcagtttccggagtgctttatttgtaacggtacgtaatcctgccacgagttaagtcatatggagataattctaccgtaactttgtctccaggtaaaatgcgaatgaagtgcatgcggattttaccagatacgtgagccaaaaccgtatggccattttcgagttcaactttgaacatcgcgtttggcagtgtttcgacaatcgtaccttccacttcaattacatcgtctttcgccattcaagtgttctcccttcttcaaatcagtaacttgctctctgacaaatttcaaaagagaaaatctcagttatccgtttgtcacacgccctgtttcgtttatactgttctgaacttccggagatacgcaatcataaagggtgaatgattgatattctatttctaaggagaatgaaatgtacgcttttctccgtctgctttagtacacgatgatgaatcttcattccggtgacagcagctagccggtttttcttccgaccaattgtaaacctacaatctgcccaggtgcggaatgaaaaacatgtgtcatggaattcatttcatcatctagacttttgtcagtatatcaaaacccgtttccgtaatcgcaatcgtatgttcaaaatgagcacactttttcccatctaccgttacaaccgtccagttatcagccaatgttttcacatatcggctgccagcgttaaccatcggttctatagcgagaaccataccaggcttcagcctaggtcctttgtttggcggaccgtaatgaggaatttgcggatcctcatgcaagtcttgaccaacaccatgtccgacatactccctaacaactgaaaactgctcattttcgacatacgtttgtattgcgtgggaaatattcgacaaacgttcacctggttttgcttccttcaagcctttatataaagactcctctgtcacttccagcagtcgtttatcatcatcactgatgtttcctaccggatatgtccaagcagagtcaccatgataaccatttaatttagcaccgatatcaatgctgataatgtcaccgtcacgcaaaacccttttaccgggaattccgtgaacgagttcttcattaactgatacacagatgctcccgcgaaacccattataccccttaaaagatgggattgcaccctgcttctcaataaaacgttcggcaatttgatccaattcttttgtcgagattcctggtttaatgtgctttttcatctcttcatgagtcaaagccacgattcgccctgcttcccgcatgatgccaagctcacgaggggtcttacagataatcatttgctcaatcctccaagaagctctttcacatctttgtacacgtcgttaatgtcctgctggccattgacgttgacaagataccctttctcagaataaaaatcgagtaaaggctgagtctgcttcatgttgacctcaagccgttttgagacggtttcctcattatcatctgcccgttgataaaggtctcctccgtctttatcacaaacacccggcgttttcggcggattgaaaaccaaatggtaggttgtgccgcaaacactgcaaattctgcgtccagtcaaacgttccattaaagagtctttgtctactttaatgttaatgacataatcaatcggcttgccgtattcctcaagaatgttttcaagagcttcagcctgagcgactgttcgcggaaatccgtccagaagaaaacctctttcacaatcatctttgccgagtctttctttgacaatgccgattgtgacttcgtccggtacgagctcgcctttatcaatataagactttgcttcgagtccgagtggtgtttcttctttcatagcagcacggaacatatctcccgttgagatatgaggtatcccataatcctcaacaattcgttctccctgtgtgcctttaccggctccaggaagtcccattaagactaagttcattcggatttcccccgtcctctcttattaagaggaatggttaaaaccagtcctctaatttttcataaatcctcggtaattacgtttcactaactggctctccagctgcttcattgtctccaaggctaccccgacgacaattaacaatgatgttccgccaatctgtgcactttgaggcaatccagcgaattgaatgaaaaagataggaagaatggaaatcacggctaagaatatagaacccacaaacgtaagtcgatacaaaatgctcgtaattctatcttgagtcattttccctggacgaacccccgggatatagccaccctgttttttaaggttatcagccatttgttcagggtttacctgcacaaaagcatagaagtacgtaaaggcgataattaatgcgacataaaccgccatgcccaccggatgtgtattgtcaaagttggcttgaatccactttgtcacatcgttctctccgaaaaatgacgcgatagtacgcggcgtaataagaaacgcaaccgcaaagattaccggaataacccctgccggattcactttaagcggaaggtgagttgactggcctccgccaacaggtgaacgaccttgcccttttgcatattgaatcgcgattttgcgtacggcctgctgaatgaaaataacaccaacaataacggccaaaatcgcaatcaccaataaagcgatttttacaatatgaataaacagctgatcgctgctgccgacaaattgagtctcataaatctgcccaacagttttcggaatactagccacaatccccgcgaagatgatgatcgaaattccgttacctactccattggaagtaatttgttctcccagccacattaaaaaagcagttcctccagtgagtactaaagcaataatcagatatgtcgatatgccggatttttcaatcagcataccgtttgccaggttgttaaacccgtaagacatacctaatgcctggataaaaccaagcacaatcgtaaaatatctcgtgaactgagctaatttacggcggccgacttcaccttgcttagaccactcggtaaacttcggcacaacatccatctgaagcagctgaatgatgattgaagcagtgatgtaaggcgtaattcccatcgcaaatatggagaactgataaagcgcaccgccgccaaatgtattaaggagatcaaaaacccccatcgaactttgtgtctgcaacgcctgagcatttacatatggcacagggataaacgcacctatgcgaaagacgataagcatgagtaatgtaaaaatgattttattccgaatatcactcacacgcataaagttggagattgtcttaaacaagttagatcacctcagctgtaccgccagcagcttcaacagcttctttcgcagaagcagagaatttattggcttttacagttaattttttctctaatttaccgttgccaagaatctttactcctgcattaagtttgctaataacaccagtctcaagaagaagttcaggagtgacttccgttccttccgcaaaaccgttcaatttgtctacgttcacaatagcgtaatccttacggttgatgtttgtaaaaccgcgtttaggaagacgttggaataaaggcatttgtcccccctcgaatccagggcgtacaccgccgccagaacgagcgttttgacctttgtgacctttaccagctgttttaccgttaccagaaccaataccacgacctacgcgattgcgtactttacgtgaaccttctgaaggctttaattcatgaagtttcattaggacacctccttagcctataatttatttttattgttctttaacagaaactagatgagacactttattaatcataccgcggatcgcagcgttatcttcatgaacgacagtttggtttgttttctttaaaccaagtgttcttacagtaacgcgctgatcttccgggcgaccgattacactgcgtttgagggtaatttctaatttagccattaatgttccctccttatcctaacagttcttctacagattttccacgaagcttcgcaacctcttcggcacgtttaagctcacttaaaccttgaagtgttgcacggatcatgttgatcggtgtgttagaacctaaagacttagaaaggatatcagcaacgccagcaagctcaagtaccgcacgtacagggcctccagcgataactccagtaccttcagaagcaggtttcaacaagatattgcctgcaccgaaacgtccgatgatttcgtgtggaatcgtagttccaaccattggtacttcaatcaaattctttttcgcatcttcaacagctttgcggattgcttcaggtacttcttgtgctttaccagtaccgaaacctacgtgaccgtttttgtcaccgacaacgactagagctgcgaaacggaaacgacgaccacctttaacaactttcgctacgcggttaaccgtaactaagcgttcttctaactctaatttgcttgggtcaatacgacgcataatcatgtgtccctcctttttttattaaaatttcagtccggcttcacgagctgcatcggccagagcttttacacgtccatggtataagtatccgccgcggtcaaatactacgtcagaaacacctttctcagaagcgcgtttcgcaacgagttcaccgactttagcagcagcagcgctgtcaccagtgctttccacgttcaaatctttatcgagagtagaagcactagcaagtgtaacgccatttacatcatcgatgatttgagcataaatgtgtttgtttgaacggaacacattcagacgaggtctttcagctgtgcctgaaagtttagcacgaacacgggcatgtcttttttgacgagcagcatttttgctagttttcgtaatcatccttaggtcactcctttcttcactttaagcggtcttacttagcagatttaccttctttacggcgaacaacttcaccttcgtagcggattcctttacctttgtaaggctctggagaacgtacagcgcgaatgttagcagcgatagctcctacacgctctttgtctgtaccttttacaactactttagtttgagaaggaacttcgatttcgatgccctcttcaggaacgatctcaacaggatgagagtatccaacgtttaaaacaagtttgtttccggatttagccgcacgataaccgacaccgactaattccaaacctctttcaaatcctttagatacgccttcaaccatgtttccaagcagactgcgagtcgtaccatgcagcgcacggtgctctttgtgatcagaaggacgagtaactgtaagcacgttgtcctcaattttgatttccatatcaggatggaaagtacgagttaattctccttttggtccttttacagctacagtgttgccttcgttcagcgttactgtaactccagaagggatctcaagcagttttttacctacacgagacatactaaaacacctccattcttgttaaacttcttaccaaacgtatgctagaacttctccaccagcttgttttgcacgggcttctttgtccgttaaaacaccttgtgatgtagaaataatcgcgattccaagaccgttaagtacgcgaggtacttcatttgatttagcgtatacacgcaaacctggtttgctgattcttttaagaccagtgataacgcgctcgttgttttgtccgtatttcaagaaaacgcggatgataccttgtttgctgtcttctacgaactcaacgtcacgaatgaaaccttcacgctttaaaatgtcagcaatttctcttttcaatttagaagcaggaatttcaagcttctcatgacgtaccatgtttgcattgcgaatacgagtcagcatatctgcaattggatctgtcataaccattatataattacctccttcccattcttggggattaccagctggcttttttcacgccaggaatttgtcctttatatgcaagctcacggaaacaaatacggcaaagtttaaatttacgaatgactgagtgcggacgtccgcagcgttcacagcgagtgtactcttgcactttaaactttggtgtacgttgttgtttcgcaatcattgactttttagccacgatttcgcctccctttcattgattatttctggaacggcatacctacttgagttaatagctcacgagcctcttcgtcagagttagcagtcgttacgataacgatgtccattccgcgaacctttgttactttatcgtagtcaatttcagggaagattaactgttctttgataccaagagtgtagtttccgcgaccgtcgaaagatttcttagaaatcccgcggaagtcacgtacacgcggtaaagatacagaaataagtttatcaaggaaatcatacatgcgctctccgcgaagagttactttcgcaccgataggcattccctcacgaagacggaatccagcaattgatttcttcgcacgagtaacgacaggtttttgacctgcgataaacgttaattcttcaacagcactgtcgattgcttttgcgttttgaacagcatcaccgacacccatgttgattacgattttttcgatttttggcacctgcataacagagtcgtagttgaacttcgtcattaaagcaggtgaaatttctttattgtacttttctttaaggcggttcatgagatagacctcccttcctttaaatactatttatctaagacttgcccagatttttttgcaacacgaacttttttgccatcttccactttgtatcctacgcgagtcacttcacctgttttaggatcgagcggcataacgtttgatacatgaattggcgcctcttgattagaaataccgccttgagggtttgcttgagttggtttagagtgcttcttcaccatgtttacgccctcaactagaacgcggtcctttttagggaaagcagcaaggatcgtaccttgtttgcctttatctttaccagagataaccattactttatcgccttttttcacatgcatcctgatcgcacctccttgagtaaggcatttatttcattagataacttctggagccagagaaacaattttcatgaagttgttttcacgtaattcacgggcaaccggtccgaagatacgagttccacgcgggctcttgtcgtcacggatgataacacatgcattctcatcgaagctgatgtatgatccgtcagttctgcgtgctccgctttttgtgcgaacgataacagctcttacgacttcaccttttttgacaacgcctcctggtgttgcttgtttaaccgtgcaaacaattacatcaccaatgttagccgttttacgtccagaaccgccaagaactttaatagtaagtacctcacgcgcaccggagttgtcagcaacttttaaacgagtctcttgttgaatcattatttgttacctcccttcggaaaaagaattccgaactttattagataataacagcttcttcgacaacttctactagacgaaaacgcttagttgcagataatggacgagtttccatgatctttacgatgtctccgattttagcttggttattttcatcatgtgctttgaatttctttgagtattttacgcgtttaccgtaaataggatcctttttgtatgtttcaacaacaacagtgatggttttatccattttgtcagaaacaacacggccttggtaaactttgcgttggttacgttcgctcatgctcacgacctcccctcagtgattatttgttggcagcaatttctctttcacgaatcacagttttcatgcgcgcgatagctttgcgcacttcacgaatgcgagcagtattttcaagttgtcctgtcgctaattgaaagcgaagattgaaaagttcttctttaagagactttactttttgttcaatttcagcagtggtaaggtcacgaatttcattagctttcatttgattcaccaccaatttcttcacgttttacgaacttcgttttaattggcaatttgtgagatgcaagacgaagagcttcacgagctacctcttcagacacaccagaaatttcaaataaaactttgcccggttttacaacagctacccagccttcaggagcccctttaccggaacccatccgtacctcaagcggtttagcagtgtaaggttttgaagggaaaattttaatccaaactttaccgccacgtttcatgtaacgagtcatcgcaatacgtgcagcttcgatttggcggtttgtgatccaagaagcttcaagagcctggataccgtactcaccaaaatgtacttcagtaccgcctttagcgcgaccgcgcatttttccgcgatgctctctgcgatatttaacgcgttttggtaataacatattattttcctccttcctcagttttcttcttagtaggaagaacctctccacgatagatccagacttttacaccaagcttaccgtaagttgtgtcagcttcagatgttgcatagtcgatgtcagcacgtaaagtgtgcaatggaacagttccttcactgtagtattcagaacgagcaatgtcagctccgccaagacggccggaaaccattgttttcacaccttgtgctccagcacgcatagtgcgttggatttgttgtttctgcgcacggcggaaagaaatacggttttctagttgacgagcgatgttgtcagctacaagctgagcatcaagatctgctcttttgatttcaagaatgttaatgtgtacacgcttgccagtaaggctgttaagggctttacgaagtgcttcaacttcagatccgcctttaccgattaccataccaggcttagcagtgtggatcgtaatgttaacgcggtttgctgcgcgctcgatttctactttagaaacagaagcgtcagaaaggcgtttgctaatgaattcacgaatttttaaatcttcgtgcaggaagtcagcgtaatctttaccagcgtaccacttagattcccaatcacgaatgactccgatacgaagaccgactggatttaccttttgacccactacttatccctccttcttttctgatacaacgattgtaatgtggctcgtacgtttgttgatttggctcgcacgtcccatagcacgcgggcggaatctttttaacgttgggccttcgtcaacaaatgcctgagaaataaccagattgttagcgtccatctcgtagttgtgctcagcatttgcgatagcagattttaaaactttttcgatgatcggagaagcagctctcggagttaagttcaggatagatactgcttcgcctacttgcttacctcgaatcaggtccattactagacgtgctttacgaggagcaatacggactgttcttgcaacagctttagcttgcatttaaaagcctcctctcttagcgtcttgtttttttatcgtcactggcgtggcctttgtaagtacgagtcggtgcgaattcgcccaacttgtggcctaccatgtcttcagaaatgaatacaggcacgtgtttacgtccgtcatatactgcgatagtgtgaccgataaattgtgggaaaatagttgaacggcgagaccaagtttttacaacttgtttcttgtccgtttcatttaatttctcgatttttgtcatcaagtgtccatcgacaaatggtccttttttcaagctgcgagccattttggaacctcccttcgtgattgcactacggtccgaaatgaaccgtagacaaccccattatttatttttacgacgacgtacgataaatttatcagatttgttctttttcttacgtgtcttgaatccaagagtcggtttgccccaaggagacattggtgatttacgtccgattggcgcgcggccttcaccaccaccgtgcgggtgatcgttagggttcattacagaaccgcggactgtagggcggatgcctttccagcgagagcgtcctgctttaccaacgttgataagttcgtgctgctcgttacctacttgaccgatagaagcgcggcaagcagaaaggatcatgcgaacttcaccagagttaagacgtacaagaacgtatttgccttctttaccaagaacctgagcagatgtaccagctgaacgtacaagctgtccgcctttaccaggttttaattcaatgttatgcacaactgtaccaacagggatgttgataagcggaagtgcgttacctactttgatgtcagcttcagggccggacatgatttcagtacctacttgaattccttttggtgcaagaatgtaacgtttttctccgtctacatagttgattagtgcaatgttagctgaacggtttggatcgtactcaactgtagcaacgcgtccaggtataccatctttatcgcgtttgaagtcgataacacggtattggcgtttgtgtccgccaccttggtgacgtacagtcaatttaccttggttgttacgtccgccttttttgtgaaggggcgcaagcaaggatttttccggctggtcagtcgtgatttcagcaaaatctgaagttgtcatgccacgacgtccgttagaggtcggtttatactttttaatcgccattttgaatttccctccttctttttacagataattaagcttcaaaaatttcgatttctttgctgtctgcagtaagttttacgatcgcttttctgcgacggctagtcataccagtgtagcggccgacacgttttgatttccctttgtagttcatgatgttgactttgtcaactttcactccaaagatactttcaactgcatctttcacttctgttttattagctcttacatcaacttcaaaagtatatttcttttcagtcattaaatcagcagaacgttcagtaatgacggggcgcttaagaacatcacgaggatctttcattatgcaagcacctcctctactttttcaaccgcagcttttgtaatcagaagcttctcgtggttgacaacgtctaacacgttgattccgttagcttgaacaactgtaactccagggatgttgcgtgcagaaagagatactgcttcgtttgcatccgcagttacgattaaagcttttttctcaacagataatcctttaaggatagctgccatttcttttgttttaaccgtatcaagagtaagatcttcaagaacaataatgttgttgtcgttcactttagaagacaatactgatttgattgccaagcggcgaacttttttaggtaatttgtaagaatagctgcgtggtgttgggccgaatacgacaccacctccgcgccattgcggtgaacggattgaaccttgacgggcacgacctgtacctttttgacgccatggtttgcgacctccgccgcgtacttcagaacgattttttactttgtgagatccttgacgtaaggaagctctttgcataagaatagcgtcgaatactacgctctcatttggctcaattccaaatacagacgcgtttaattcgatatcaccagcagtagaaccgttttggttgtataatgctacttttggcatgatcaatttcctcctttcctaagagacttatttagatttaacagcacttttaacagtgattaaagtttttctcgcaccaggtacgttacctttaatcaaaagaagattgcgctcagcatctacttttacgatttcaaggttttggacagtgatttgatctccgcccatgcgtccaggtaatagtttacctttgaatacacggttaggatctacaggtcccattgaaccaggacgacggtggtagcgtgaaccgtgagacataggtccgcgagattgtccgtggcgcttgattgcaccttggaaacctttacctttagatactcctgttacatctacgatttctcctgcagagaaaatttcaaccttgacttcctgaccaatttcatacgcatccatatccacgccgcgtaattctttaacgaagcgcttaggagcagtttccgcttttgcaacgtgtcctttttccggtttgtttgaaagcttttcacgcttatcgtcaaaaccaagctggatcgcttcatagccatcattttcagctgttttcttttgaagaacaacgtttggagctgcttcaataacagttaccgggataagatcaccgttctctgcgaatacttgcgtcataccaatttttcttcctaagattcctttggtcattcgtcacacctcctattaagatcattctatattttagaattaaagtttgatttcgatatcgacaccagatggtaagtctaatcgcatgagagcatcaacagtttgtggtgttgggttcacaatgtcgattaaacgtttatgtgtacgcatttcaaattgctcacgagaatctttgtatttgtgcaccgcacgaaggattgtgtaaactgatttttcagttggcaacggaatcggaccagatacgctggcaccagaacgttttgccgtttcaacaatcttctctgcagattgatcaaggattctatgatcatatgcttttaaacgaatacgaattttttgttttgccattattttccctccttttcgcctacatcacgttagacagttctccgtgagaaaaacctgatcaccttgccatggcaaagcggccgggtgtgtcagcaacctctcacttcatcgcagtcaaagaccaacatacactattatacagaaaatagacgcatgttgcaaggtttatttaaagaaccttgtggttttcacactttgattattatacaggtgataccatgattaatcaaggatatgcctgttttctttcagagatggaacgatgcgaaccggctgacaacttcggcaaagcgatccggttcctccaagtgaggcgaatgggctgagttctcaaaccaatgccattctttatacggcgcatcaaccttctgataatattcataagacgtcgtccccgggaccgtcaaatcgtatctccctgacataaaacagcacggtattataatagaagaaactgattctccggcatcaaagaaaatgagatcctcccacaggtgtttcaggctgaacatttgcccccgcgcggctaagaagctccccctcacaccgtacggttcaccaaacagcattcgcccccctgctttaagagcaccgatcggatgatgggtaaagccccctcccctcatctcgatacaaagcagaaataacgatcgctgcagctgtttctcccatggaggcgctccgataaagcgcagcgtcttttccagcaggaaatgtttgcgttgcctgctccattccatcatcagccggtaagcttccatttcttccttttgaatattaaccacctgactgataccgatatacccataatacaaatcaggtctctcttgaagaacatgaagcgccagaactgacccccacgaatagccggcgatatatattttttgcctgctgaattgcttgcataagcgttcagtcaaatgaatggtatcggctgtcagctgatccaaggtcatagatgagcccggaatttcctttgaataagagagacccgcccctctctgatcccagttcacaacggtgaaatgcttttccagcttattctggtattttctcgcatagccgatttgaggagtgccgggaccgccgtgcaaaaacaaaagcagcggattactcctgtcatcaccattaatcataatggtttgttcactgccattaatcagcaattgctgaagcattgaaatacgattggttttcttgaagttatcgttcatcggtctgctcctaaaatttgtatacgttctattatacatggaatcagcggggaaacaaaaaaacgaggccccataagggaccccgcattaatgaacgagtcgattactcagtgattgtagaaacaacgcctgaaccaactgtacgtccgccttcacgaatagagaaacgagttccttcttcgatagcgattgtagagataagttcaacgatcatttcagtgttatctccaggcataaccatttctacgccttctggaagattgatgataccagttacgtcagttgtacggaagtagaactgaggacggtagttagagaagaatggagtatgacgtccaccctcttctttagaaagaacgtaaacttcagctttgaatttgctgtgtggagtgattgtacctggtttagcaagtacttgtccacgttggatgtcttcacgagctacaccgcgaagaagcgcaccgatgttgtctccagcttcagcatagtcaagaagcttacggaacatttcaacacctgtaacagttgttttgctgttttcttcttgaagaccgatgatttcaacttcgtcaccgactttaacttgtccgcgttctacacggccagtagcaactgtaccacgaccagtgattgagaatacgtcctcaactggcatcatgaatggtttgtcagtgtcgcgttctggagttgggatgtactcgtcaactgcagccataagttcaagaattttttcttcgtactcagcgtcaccttcaagagctttaagagcagaacctttaacaactggtacatcatcaccagggaagtcgtattcgctaagaagatcgcgaacttccatttcaacaagctcaagaagctcttcgtcgtctaccatgtcgcatttgttaaggaatactacgatgtatggtacaccaacgtttttagaaagaaggatgtgctcacgagtttgtggcattgggccatcagcagcagatactacaaggatagctccgtccatttgcgcagcaccagtgatcatgtttttaacatagtcagcgtgtcctgggcagtcaacgtgtgcatagtgacgagtgtcagtttcgtactcaacgtgtgcagtagagattgtgataccgcgctcacgttcttctggagcaccatcaatttgatcgtacgccatagctgtacctttaccagatttcttatgaagtactgttgagatagcagcagttaatgttgttttaccatggtcaacgtgtccaattgtaccgatattggcatgtgatttggaacggtcgaatttttctttagccattctaaaatcctccttaagagcttttaattagtaatgtatagagtgatagaaagtgaaagcaagctttcacttcctcatcttacaatagtagttatacttgagttaagtggcaaaatcaattattcgcctttattttttttgataatttcttcagcgatgctcttcggcacttcttcgtagtgatccatgaacattgtgaacgtaccgcgtccttgcgtgttagaacgaagggcagtagcgtaaccgaacatttcagcaagaggtaccatcgcacgcacaacttgagcgttaccgcgagcttccataccttctacgcgtccgcgacgagaagtaacatcccccatgatgtctcccatgtattcttcaggaataacaacttcaactttcatgattggttcaagaagaactgggttacatttgctgactgcatttttcaatgccatagaagcagcgactttaaacgccatttcgtttgagtcaacatcatggtaagatccatcaaaaagtttcgccttgatgtcgattagcgggaatccggctaggacaccattttcaagagagtcttcaagacctgcttgtacggctgggatgtattcacgaggaacaacacccccgacgattgcgttttcgaattcaaagccagcgccttcttcgttcggttcaaattcgatccaaacgtgaccgaactgaccgcgtccgcctgattgacgtacgaatttaccttcaacttttgcaccggtacggaatgtctcacggtacgcaacttgaggagcaccaacgttagcttcaactttgaactcacgcttcatacgatcaacaatgatatcaaggtgaagctcacccataccagagatgattgtttgacccgtttcagggtttgtttgtgtacggaatgtaggatcttcttcagcaagtttcgctaaagcgatacccattttatcttggtcagcttttgatttaggctcaatcgctacgtcgataacaggctctgggaattccattgattcaaggattacaagatccttctcatcacatagagtatctccagtagaagtatcttttagacctacagcagctgcgatgtctccagcgtaaacagtagagatctcttcacggctgttagcgtgcatttgaaggatacgtcctacgcgctcacgcttgccttttgtagagttctttacatatgaaccggaatcaagtgtaccggaatatacgcggaagaatgtcagcttaccgacataagggtcagtcataactttaaatgcaagtgcagagaacggctcttcatcagaagaatgacgaacgatctcttcatctgtgtcaggacgtacacctttgattgcagcaacatcagttggcgcaggaaggtagtcaagaacagcatcaagtacaagctgaacacctttgtttttgaaagcagatccaacaagtacagggtagaattcaacattcagtgtacctttacggatagcagctttcagttcagggatagtgatttcttcaccttcaaggtacttttccataagctcttcatcaagctcagctacagcttcaatcaggctgctgcgaagctcttcagcttgctctttgtactcttcagggatttctttcgcatctgaacgagttccaaggtcatcttcgtagaaatacgcaacgttttctactaagtcgatgataccttcgaagttgtcttcagcgccgatcggcaattgaattgcgtgagcgttagcttgaagacggtctcttaaagtgcctacagagtaaaggaagtctgcgccgattttgtccattttgttgacaaatacaacgcgcggcactccgtaagttgttgcttggcgccatactgtttctgtctgaggctcaacacctgattgagcatcaagtacggcaaccgcaccatcaagtacacggagtgaacgttcaacttcaactgtgaagtctacgtgtcccggtgtatcgatgatgtttacacggtaacctttccactgtgcagtcgttgctgcagaagtgattgtgataccgcgttcttgttcctgctccatccagtccatttgcgaagcaccttcgtgagtttcgccaattttgtggatacggcctgtgtagaacaagatccgttctgtagtagtcgttttaccggcatcgatgtgagccatgatcccgatattacgagttttttctaaggagaactctcttgccattgggtaatttctccttccttattagggaattattattttgattatatgaatcctaccagcggtagtgagcaaatgctttgttcgcttctgccatcttgtgagtgtcttcacgtttcttaacggcagcaccagtgttgttagctgcatcaagaatttcgttagccaggcgctcttccattgttttttctccgcgaagacgcgcatagttaaccaaccagcgaagaccaagagttgtacggcgttcaggacgaacttctacaggcacttggtagttagctccacctacacggcgtgcttttacttcaagtacaggcatgatgtttttcaatgcttgttcgaaaacctccattgcatcattgccagtgcgttctttaatgatatcgaatgacttgtataggattgtttgagatttaccttttttaccgtcgatcatcattttgttgatcaggcgggataccagcttagagttgtaaagcggatcaggtaaaacatctctttttgctacaggacctttacgtggcatctgaatatcctcccttcatagttttaatgatttatttgattactttgctttaggacgtttcgtaccgtatttagaacggccttgcgcacggttttcaactccggcagtatcaagcgcgccacgaacgatgtggtagcgtacccccggtaagtcttttacacgtccgccgcggatcagtacaacgctgtgctcttgcaggttgtgaccgataccaggaatgtaggcagtaacctcgattccgttagtcaaacgaacacgagcatatttacgaagtgctgagttcggttttttcggtgtcattgtacccacacgagtacataccccgcgtttttgtggagaagatacgttagtgtgctcttttttaaagctgttgtatcctttgtttagtgcaggtgacttagagttttcaactttgctcacgcgtcccttgcgaattagctgattaattgtaggcatgttgtgttcctcccttcattacgttttataacccacatacccaggtggttcatcattaggcaaaaaacaatgtctttacacaagattgatatcttatataaaaacaaaaagtacgctataacataatggcaacagctgctgctcccacttcaattccgcaggctttgccgagctttttcatggaatccaccatacagacagcggtattttggttctttgcaagctggataacgccagctgtaagaactgaatccgcgtcttttgccacgacgacttccttcactgaacctcgttttagagctttcactgtttgcttcgtaccaataataattgatttggcctgtgatactttatcataagacataaacatatcctccaaagtaacaggttttatttcgagcaccttggttatattatcactctgcgggacggatgtcaacaacgtatgacattttttagtgcagtccaccgccagaataattgtaatactgaggaaaagctgtcgaaacagcctttcctgcagcagtctctgttattcagccggaaccatatcttccgaaggctgaacgtttgaaacaggttttacttttctgtaattcatcataccggtaccggccggaaccagtttaccgatgataacattctctttcaggccgagaagttcatcgcgcttgcctttaatcgcagcatctgtaagaacgcgtgttgtttcttggaatgatgcggcagacaagaatgaatccgtctcgagtgaagcttttgtgataccgagaaggacaggacggcctgtagcaggtcgattgccttcaagcagcacttttttgttcgcttctgtgaattggtgaatatctagcaatgtgccagggagaacatcagtatctccggcatcgatcacacggactttgcgaagcatctggcgaaccattacttctacgtgtttatcgccgatttcaaccccctgcatacggtaaaccttctgaacctcatgcagaagatattcctgaaccgttgtcaggtcagtgactttaagaagttctttcggatcgatagaaccttctgtcagcacttgaccgcgggtaatctgatcaccctcagccactttcaggcgtgagttgtaaggtgccgtgtatgaacgtgtctcaacagcgccctgaacaacaatctcctgctgtttgtcgcggacttcattgatttcggcaattgtaccgtcaatctcagaaatcgtcgcttgacctttcggattacgcgcttcgaaaagctcttggatacgcggaagaccttgtgtgatatcgtctccggcaaccccgcctgtgtggaacgtacgcattgttaactgtgttccaggctcaccgatagattgagcggcgataatacctactgcttcgccgacttcaacatcagttccggttgcaaggttacgtccgtagcatcgtttacatacaccatgaggagtgttacatgtgaacgcagaacggatccacacttcttcgattccggcttcaacgatttccagcgctttatcttcatcgatcaattcattttcgttaatgagtacagcacccgtttcaggatgtttgatctgttttctggcgaaacgtccgatcagacgctcttccagacgctcgatgatttccgtgccttctttgagcggttttgcaagaataccgcggtctgttccgcaatctgtttcacgaatgataacatcctgcgcaacatcaacaagacggcgtgtaaggtaacctgagtcagctgttttcagggcggtatcggcaagacctttacgcgcaccgtgagtggagataaagtactccaatactgtcagaccttcacggaaactcgatttaatcggcaattcaatgattcgtccagccgggttggccatcagaccgcgcatacccgcaagctgtgtaaagttagatgcgttaccacgggctcctgagtcactcatcatgtagatcgggttgacttcgtctaatgatttcatcagtttgccttggataacatctttcgctgaactccaaattgaaatgactctttcataacgttcttcttcggtgattaaaccgcgtctgaactgtttcaggacattatcaactttgctttgtgcttcttcaaggatttcctgtttgtcatcgagaacgacgatatcagaaacccctactgtgatgccggctttcgttgaatatctgaaaccgaggtttttcatgcggtcaagcattttagacgtttccgtgatatggaatcgtttaaagatttccgcgatgattttaccgagaatgccttttttaaacggtgcgttgatcggctgctcagcaatcacagcttttacgtcagcacctttatctaagaagaaacggtcaggtgtcttctcttcaatgttgctcttcgttggttcattcatgtaagggaatgattccggaagaatttcattgaagacgagcttaccgacagttgtaattaacaattttgaacgctgttcttcagtaaatgtcacattcttaagggagttcgctgcaacagcaactctcgtatgaaggtgaacataaccgttttgataagcaagaagcgcttcgtccgtatttttgaaaaccataccctcgccgactgctccggcgcgctcaagcgtcaggtagtagtttcctaataccatatcctgagacggcgtaacaaccggtttaccatctttagggttcaagatgttttgggccgcaagcatcagaatgcgcgcctcagcttgagcctcagctgataaaggtacgtgaaccgccatttggtcaccgtcaaagtcagcgttataagctgtacatactaacgggtgaagacggatggcgcgtccttcaacaagcgtcggttcgaaagcctggatacctaatctgtgaagagtaggggcacggttcagtaagaccggatgctccttaatgacagattcaagtacatcccatacttcaggctgcacgcgttcgattttgcgttttgcgctcttgatattgtgagcaaggcctttttcaacaagctctttcatgacgaaaggcttgaagagctcaagcgccatttccttcggcaaaccgcactgatacattttcagatgcggacctacgacgataacggaacggcctgagtagtctacacgtttaccgagaaggttctgacggaaacgcccttgtttccctttcagcatgtgagaaagagatttaagcggacggttacccggtccggtaaccggacggccgcggcgtccgttgtcaatcagagcatcgactgcttcctgaagcatacgtttttcgttctgaacgatgatgcttggcgcgccgaggtctaacagacgttttaaacggttattacggttgatgacacgacggtaaaggtcgttcagatcagacgttgcgaaacgtccgccgtcaagctgaaccatcggtcttaattcaggcggaataaccggaagcacgtcgaggatcatccaagacggcttgtttcctgaattacggaaggcttcaagcacttcaaggcgtttgatcgcacgtgtacggcgctgtccttgagaagtcttcagctcttcttttaacatatcaacttctttgacaaggtcgatgtcctgcagaagtttattaatggcttccgcacccatagaggcttggaatttgtttccgtacttatccagatacgcacggtattccttttcagataaaagctgtttcttttcgagcggtgtattggccgggtcagttacgacgtaagaagcaaagtaaataacttcttccagcgcacgcggtgacatatccaatacaagacccatacggctcggaatacctttgaaataccaaatgtgagaaaccggggcagccagttcaatatgccccattctctcacgacggactttagcccgcgttacttcaactccgcaacggtcacaaactacgcctttataacgaacccgcttgtacttgccgcaatgacattcccagtccttagtcggtccgaaaatgcgttcgcagaacaggccgtccttttcaggtttcaacgtacgatagtttatcgtttcaggctttttcacttcaccaaaagaccatgaacggattttatccggtgaagcaagaccgatgttcatatactcaaaattgttcacatctagcaaggggcctacctccctttttatcttcggattaaccgatgtcacttgcctttatcaatcagagactattctttcgttactgcgtcacgttcaacgtctggagatgctgtttcttccggcgcttcatcacctgataatgcaaggccgtcagcttgtttcgcatcttcctcgtcttctagatctctcatttctatttcttcttcatcgcctgaaaggatttttacgtccatacctaagctttgaagctctttgatcaatactttgaatgattccggaacaccaggctctggaacattgtcgcctttgacgatggcttcatatgttttcacacgtccgaccacgtcatcggacttcacagtcaggatttcttgaagcgtgtaagctgcgccgtaagcttcaagcgcccaaacctccatctcaccgaaacgctgtccgccgaattgggctttaccgccgagaggctgctgcgtaacaagtgagtaaggacctgtagaacgggcatgaagtttatcatcaaccatgtgcgccagtttgatcatgtacatgattccgacagatacacggttgtcaaacggttctcccgtacggccgtcataaagaactgttttagcgtctcttgacatgcctgcttcttcaagtgtttcccacacatcttcttcacgcgcgccgtcaaatacaggtgacgcgatgtgaatgccgaggtagcgggcagccatacccatgtgaagttctaatacctgaccgatattcatacgtgatggtacacccagcgggttaagcatgatatcgatcggcgtgccgtcaggaaggtaaggcatatcttcttcaggaagaatcttcgagataacccctttgtttccgtgacgtccggccattttatcaccttcagaaatcttacgtttctgaacgatatatacgcgtacaagctggttcactcccggaggaagttcgtcgccgtcttcacggttgaagacttttacgtcgtggataattccgccgccgccgtgaggtacacggagagaagtatcacggacttcacgcgctttttctccaaagatcgcatgcagaaggcgttcttcagccgtaagctcagttacacctttaggcgttacttttcctacgagaaggtctccgtcgttgacttccgcaccgatacggataattccgcggtcatcaagattgcgaagcgcgtcttcccctacgtttggaatatcgcgggtgatctcttcaggcccaagctttgtatcacgtgcttctgattcatattcttcaatgtgaatagatgtgtatacatcatctttcacaaggcgttcactcataatgatggcatcctcatagttgtaaccatcccatgtcatgaagccgaccattacgttgcggccgagagcaagttcaccaagctccattgaaggtccgtcagcaaggatttctcctttgactacttcatcgccgacactgacgatcggacgctggttgtagcacgtaccttggttggagcggacaaatttcagcaagctgtacttatccaggttgccttttactttttggccgtcaatttcttcatagcggcgcacccatacgtttttcgcttccacccgttcaacgataccagggtgtttacaaataacggctgcaccggagtctttaccggatacgtattccatacccgttccgacgatcggagcttccggctgcatcaaaggcacagcctgacgctgcatgttcgctcccatgagggcacggttcgagtcatcgttttccaagaacggaatacatgctgtcgcagcagatacaacctgtttaggagatacgtccatgtaatccacgcggttgcgggctacaacggtgttttcccctctgaaacgcgctacgatgctgtcatccaagaaagaaccgtcatcgctcagcttagcattcgcttgggctacgacatagttatcctcttcatcagcagtcaggtagtcgattctaggcgttacttttcctgtttcaggatcaacgcggcggtatggcgtctcaatgaaaccaaagcggtttactttcgcaaatgatgacaatgagttgatcaaaccgatgttcgggccctcaggcgtttcaatcggacacatacggccatagtgagagtagtgaacgtcacgtacttccatacctgcgcgctcacgtgtcaaaccgcccggtccgagagctgacagacggcgtttgtgtgtcaattcagcaagcgggttcgtctgatccatgaattgagaaagctgtgagcttccgaagaactctttaatagacgcaataacaggtctgatgttaatcagctgctgcggcgtaattgtattcgtgtcttgaatagacattctttcacgtacgacacgttccatccggcttaaaccgatacggaattggttttgcaggagctcacctacagaacgcagacggcggtttccgagatggtcgatatcatcagtgtcgcccactccgtgcaggaggttgaagaagtagctgatagaagaaataatatcagcaggcgtaatgtttttaatcgcctcttcgatgtaagcattgccgatcacattgatcgtctgctctccttctgcatcggtaggagcatagattttaatggattgaagcatcacttcatcctcgacaacgccgccgttaggataaagttttctgaagccgattccattttctaagtatggcagtactttatcaagtgttcttctgtcaagaatctgccctttttcagcgagaatttcaccggtttccggatccaccagtgtttctgcaaggcgctggttaaacaggcggttcttgatatgaagctttttattaattttatagcgtcctacattcgcaaggtcgtatcgcttcggatcgaagaaacgggaatccagcaagctttttgcgttttctactgtaggcggctctccgggacgaaggcgctcatagatttcaagaagcgctttgtcactgttttcagtgttgtccttatccagtgtattgcggagatattcattctcaccaatgagatcgagaatctcttggtcggaaccgaagccgagagcacgcaaaagaaccgtaaccggcaacttacgtgtgcgatcaatgcggacatacacaacatctttcgcatcagtttcgtattctaaccatgcgccacggtttggaatgacagtcgcggtaaaaccttttttaccgttcttgtctactttaccactgaaatatacacttggagaccgaacaagctgagatacgataacacgttctgcaccgttgatgataaaagtaccggtatctgtcataatagggaaatcacccatgaagacatcctggtcttttacctctccagtttctttgttaattaaacgaaccttcactctcagcggagctgagtaagtcacatcacgttcttttgactcttcaacgggatacttaggatctcctaaactgtagtcaatgaactctagagagaggttaccagtgaaatcctcaattggtgatatgtcttgaaacatctctctaagaccctcatcaagaaaccactgataagaagaggtttgaatttcaatgagatttggtaattctaacacttcgctaatgcgagcatagcttctgcgctggcggtgtcgtccatactgaactagttgacctgtcaactgattcacccctcaaatcatgcgtattatatgtgtaataagcatctcttacgataaagaaatacttttacaagacaaaagaaaaaagggtttctaattaagaaaaccacatccaaaaacaaataccgattttattagcatttccatgtttgtataatttatacatgcactatgattatttcagcatatcatgcaaaatatatacattggcattttacaatattaacatagctgaaaaatcaagtcaaactttttttgcttttatgatataatagcctttctttttttgaatcacagaaacttcgtcaaaaagctccttcagtttttcaatggcagaaggcccgccctgttttttctgtataacgatccacaattcacctgaagcccttaaatgctcagcgcttttttcaaaaatggcatggacaactttttttccggcgcggattggggggtttgtaataatagaagcaaatgtttgagcagaatcaatatttgaaaataaatcactctgataaatccgaacgttttttattccgtttttttctgcattttcatttgacagctctacggctctttcattcacgtcaatcatgtgcacggtccggtccgtaaattcaccggcgagtgacagaccgatcgggccgtaaccgcagcctgcatccaggaagtcaccatcgatctccggctcttcaaacgcttcaattaagacacgcgaaccgaaatcaacttcctttttcgagaaaacgccgctgtcacttgtgaatgtataagatctgttccgcagtgtaaatgaccatgtctgtttatcgcttttaactgaaggtttttctgaataatagtgatcactcattattagaacctccttttataatggcacttaaagaaaagcaaagaaaaagcccgcctcataaaagcgagcttcccctacaggcaagtgaagattacttaacttctacagaagcgccaacttcttcaagtttagctttaagctcttcagcttcttctttcgcaataccttctttaagtggttttggagtgttgtcaacaagttctttagcttctttcaagccaagaccagtgatttcacgaacaactttgataactttgattttctgagaacctgcaccagcaaggataaggtcgaattcgctttgctcttcagcagcgccgccagcagcagctccgccagctacagctacaggagcagcagcagttacgccaaattcttcttcgattgcttttactaggtcgttcaattcaagtacagttgcttctttaacggaagcaatgatttcttcgatatttaaagccatttgaaattcctccatttgttttattttagggtaaaatcagattaagcgccttgttcttccttttggtctgcaactgctttagctgcaagtgcaaggttgcgaactggagcttgaagtacgctaagcaacatagaaagtaagccatcgcgtgaaggaagttcagcaagagctttcacttcttcaacagaagatacttttccttcgataacgcccgctttgatttccagagcttcgtgatttttcgcgaactcgttaagaacttttgccggagcgataacatcttcagtactgaatgcgatcgcattcggtccagttaagacatcattcaaaccatcaagttcagcttgttcaaccgcacggcgagtcattgtgtttttgtacactttgaactctacgttagcttcgcgaagctgtttacggagttcagttacttcagaaacgttaagtccgcggtagtcaacgatgatcgttgatttgctttctttcagtttagaagcaatctcttcaacaacaactttttttgtatcaattgcgctgctcatggttacacctcctgtagattttgtgtaacacttataccgctaggtgatcacgactgtgacgacgatttcatataaaaagcctccatgtggacatggaggctgtatatacaagcatacgtaacgtaatagctgtgatatatatacacctcggcaggatattaagccttaacggcccctgctgtctacggtataaatgacatattatattttacaacattttgaatcatatcagaatgctgatctaaagtcaaatattattttacgttgaaagtagaagcgtctactttgacaccagggcccatagtagaagtaacggcaacgtttttcacgtaaacacctttagccgcagccggttttgctttcaggattgtatcatacattgttgtgaagttctcaacaagtttttcatcctcgaaagaaacttttccgatcggaacatggatgttaccagctttgtcaacgcggtattctactttaccagctttgatttcgccgattgctttttccacttcgaatgtaacagttcctgttttagggtttggcataagaccttttggtccaagcacacgaccgattttaccgacttcacccatcatgtcaggagtcgcaacgattacatcgaattcgaaccagccttgctggattttcgcgatgtaatcagaatcgccaacgtagtctgcaccggcagcttcagcttcttttgctttttcgcctttagcgaatacaagcacgcgctgagttttaccagttccgttaggaagtacaactgcaccgcggatttgctgatcgtttttacgagggtcaacccctaaacgaaaagcaacttcaactgtagcgtcgaatttagctgtgtttgtttttttagtaagcgccactgcttcagcgacatcataagctttcgcacggtctacaagcttcgcagcttcaacgtactttttaccttttttagccattttaaaatttcctccttatgtggttatagcggaataacctcccacgaataagggttgcgaacttgtgaaaactcgcaacccgacaagaaacaaattaatcctcgataacgatacccatactgcgggcagtaccttcaaccatgcgcattgccgcttcaacgtctgctgcgtttaagtcaggcattttcgtttcagcgatttcgcgaaccttatcgcgcttaacggttgccactttattacggtttggttcaccagaaccagactcaattccagctgcttttttaagcaatactgcagcaggcggagtttttgtaataaatgtaaatgaacggtcttcgtaaaccgaaatttcaacaggaatgattaaaccagcttggtcagctgtacgagcgttaaactccttacagaatcccatgatatttacaccggcttgacctagtgcaggtccaactggcggcgctgggttagcttttccagcaggaatttgcaattttacaacttttactacttttttagccacgagacacacctccttaagtccgtgatgtggtaatagggtaaaccctcccactcaaggtttcattctttatatgaatgacgaaatatcaagctagctgccttggattagtccaagacgtacctttgctatattatcattaatatatagcaatttcaagttttttcacattacaatttgtcgatctgggtaaattccagttcaaccggcgtttcacggccgaacatgttaacgaatactttcactttgctcttatcataatcaatctcttcaattgatcctgtaaagttggcgaaaggtccgtctatgactttgactgtctcattcaattcaaaatcaatgtcggttttccgctcatccatgcccatgcgttttaagatggtttccgcttcgccaggaagaagcggagtcggctttgagcctgaaccggctgatccgacgaatccggtaacgcccggcgtgttgcggaccacataccaggaatcatcagtcatgacgatttcaacaagcacataacccgggaacactttctttttgactacttttttcttgccgttcttaatatcagtctcttcttcttcagggacgacaacgcggaaaattttatcctgcattcccattgattccacacgtttttcaaggtttgcttttactttgttttcataaccggaatacgtatgaacaacataccaattcttttccattctatcaggactctgcagtccttccctccccgcatttaaaaatgaagtgtaaaacaaaaaataggctcagggcctatgaatccttttttcaacaacacaataaaaaacccgctgaacgggttttggcaaacgatattatgatctattatagcacgtattgctgatcattattcaactattaaacgaattaattgagaaattcctgtatcaaggagggcaaaaaagataacaaaaaagataaccgttgaaatcaccgtgatcgtatagcgcgttaactctttgcctttaggccagctaacctttttcatttctttcccaacatctttaaagaaactcatcatgcgcatgtaaaagacctccacaatttaaaaagcgaacactattttgtttctaaatgagctgtatgtgaattgcaagtgctgcagtacttcttaacttctaaccgctcagccgctgatgcagagcttttcattgtcgtataattacgatttccgcatgttttgcatgccagcgtaatcttttttctcatgtcgttacaccttttcctaaacattcatttatcttaataaaatagcacagtcagaaaaattctgtcaatatgacacagaaacctgctacaggctgatctctcttatttctaaatacttttcaagcttgcgcttcacgcgctgcagggcattatcgattgattttacgtgtcggtttaagtcatctgaaatctcttggtaacttcttccgtccaagtacaaaacaagcacctttctctccagatcgctcagcagttctcccattttcatttcgatatcatcaaattcttcctgattaataatcatctcttcaggatttaacgttttagcgcctgaaatgacatcaagcagtgttctgtcagattcttcatcaaaaataggtttgtctaaagaaacataggaatttaaaggaatgtgtttctgacgggtagctgtctttattgcggtaataatctggcgggtaatgcataattctgcaaaagctttaaatgaagtaagcttgtcctctctaaagtctcggatagacttatataagcctatcatcccttcctgtacaatatcttctctgtcggcccctattaaaaaataagaccttgctttcgcccgtacaaaattacggtacttcgtaatcaagtaatctaacgcatcactatccccaacatgaaccttttcaatgacctgctcgtcctccaactggcaaaattgcactttgttgaactttcccttgctgttctgtagattcactgcgatccccccggcgcacgtagatagaaatattatacattaatgggcgaaaaagcgtcaacctaatccagaccgcctcggcgccacttttcaaacgttttcaaaacctcttcggacagctcgattttacccggtggtttttcagaagtgatctttgaaacccgcctttgaatccggcgttctatcgtatccacttccctcaggagctcccgggcggatttacggagagccccttgtccgaaaatcgcccactgctccgtataatcggaggttgcgacatgaatctgtgtcgcaatattattcagcgcctgggcaagcttctcgatccgctcatccgccgtttcattctcccgtgtgaaaatcacttcgactctgtgattcgtttgttttttctctatgccttttaccaggtgtgcgtcaaacaccacaatgactctgattcccgtgtaggactgatattccgccatcttctggatcagtacatctctcgcttcttcaaaactgttcgcttttaaatcctttagctgcggccaagctccaatcatgttgtatccgtctactaacaggatgtccatctgtcttcattcccctaaaggattgcgcttccggtagacttcatacatgagaaggccggccgctaccgacgcattcagagaagtgacttttccggccatcggaagcttaatgagaaaatcacatttctctttcacaagccggcccattcctctgccttcgcttccgataacgagcgccaaaggcatcttgccgtccatagagcggtagtcttcccgggcggatgcatccgttccgacgacccaaatcccccgccccttcatttcatcaagtgtccgggcaaggttggtcaccttcacgacgggaatatgttcaatcgcaccggtcgaagcttttgcgaccgtcgaagtcagtccgactgctctgcgtttcggaatcacgatgccgtgtgcaccgacagcgtcagccgttctcatgatggaaccgagattatgagggtcttccagctcgtccagtatgagaaagaaaggctgttcgtttctctcttccgctcttttatataattcgtctaattgtgcatattcatatgccgccacctgggcgacaacaccctgatgctgcccctccaccatctgatcgagttttttcctcggtacaaattgaatggtgacgccgcgctttttagcaagctccataacttgctgcgcctgtccttttactgtgttttccgccatccataacttatacagcttgcgatctgactttaacgtctcaatcaccgcgttttttcctatgacgtaatcatgttgctgactcatttgttttcctccctgacgtcccgacttgtatagcctcagcaatcagctgattcagtctttcttctcttttctcaagaaaaaggtaaccgagtaaagcctcaaaagctgtactatggcggtacgtctgtacatctgtgtttttaggcgtcgtccctgatttcgcgtttctgcctcttctcagcacggcttcctcttcctccgtgaaaaaggattcgtcctgaaggcggaacaatatgtctgcctgtgattttgccgatacaatccggctcgccttcttatgaaggtcattcggtttcgtaaagccctgcttaagcaggtgatgccggacgtatatttcaaaaatggcatcacccatataagcaagcgcaagaccgtttaactgctttgaatctttgatttgttcaaattgaagcatccgcttactctccccgcttccagcgagttccctgggccgtatcttcaagaatgatattcatgcttttcagctgatcgcgaatctggtctgacaaagcaaaatcgcgattgcggcgggcttcatttctcttctcaatcaactcttcaatctgttcgtcgacaagctcttcttcgccgagcgtaagtccgagaacagatccgattctgtcaaacatgctgataaaggctttaatgacgtgatccgccgtattgtcttcctgcatgtagtaattggcgagcttcgccagatcaaaccaaacggaaattgcattcgccgtattaaaatcatcatccattgcttcttcaaacgcagtgcggtgctcttcgattttagcgagccattcctcatcattgtcagtcagattcgtgctgctaatcaaacgatggtttaaattactgtaggccgtcttcaggcggttaaacgcgttttttgttttctcaagcagctcttccgaatagttgatcgggtggcggtaatgaacggacagcatgaaaaatctcaaaagctgcgggtcatgttgcttaatgatatcgtgcaccaaaacaaagttgccgagcgattttgacattttctcattatcgatattgatatatccgttgtgaagccagtattttgcgaatgtcttgcctgttaatgcttcagattgggcgatttcgttttcatggtgcgggaatgtcaggtcctgaccgccggcatgaatatcgatttcgtcacccaaatactttttcaccattgcggagcattcaatatgccagcccgggcggccttttccccaagggctatcccatgaaatttctccgtccttagcagctttccaaagagcaaagtccagcgcatcctctttcttctcgccgacacggatacgcgcgcctgatctgagttcatcaattgattgctgagatagcttgccgtacccttcgaaggcccttgttttgaaatagacgtcgccttctgattcataagcgtagccttttttaatcagttcgctgacaaattcaataatggcacccatgttttccatgacccgggggtgaagatccgctttccggcatccgagggcgcccacatcttcaaaatacgctttaatgaaccgttcagaaacggtcgggacgtcctcgccgagctcgttggccgccttaatcagtttgtcgtcaacatcggtgaaattcgatacgtattgaacatcgtatcctttatactctaaatagttgcgtacggtatcatacacaatcgccggacgggcgttgccgatatgaatatagttgtatacagtcggtccgcacacgtacatttttactttgccttcctcaagaggaacgaatgtttcttttttccgtgtcaatgtattataaagtgtaatggtcatttttggttgatcctttcttttttatcttccagttcagcctgcagttcaaaaatctgctgctccaatgctcttaacctgtcagcaaccggatcgggcaagtcttggtgattgagatcgcgtttgatttttcttccgttctgaatgacgacttttccaggtatgccgacaacggttgaaaagtcgggaacatcacgaagcacaacggaaccggcccctactttagaaccctgcccgaccgtaatagagccgagcaccttcgctccggttgcaattaaagcatcatcttttatggtcggatgccgcttccccttttcttttcccgttcccccgagagtgacaccttggaataccgtcacgttattgccgatttcacatgtttcccctatgacgacccccataccgtggtcaatgaaaaaccttctcccgatggtcgcgccgggatggatttcaattccggtaaagaaacgggcaatctgtgatatcaggcgcgccaggaagaaaaatctccgtttatataaagcatgtgcaatccgatgcgcccatatagcatgtaaaccagaataagttaaaacaacttcgaaatagcttcttgctgccggatcttgatcgaacactgtatctatgtcttcttttagcattttaaaaaacacatgcttccccccattctctccccgctccagtctgtttttccgcctataaaaaaagcgcctctgcatgtaaacatgacagagacgcttttaccgcgcggttccactctgtttgaaaaacaagtcactgttttcccaacttaaaagccggtaacggcggcggccgcctttaaatactgatttccgcagaaatgttcttcaaaggtcttaagggcgcacttctaaaacatgacgcatgaatctctctcagccgatgaagattctttctgtaatggtcattgttttatactcttccctgtcaacaatcgtatatttaaatgcttttcaggcgtctgacggctgtttctctgccgatcagctcaatggcctgcggaagctcaggaccgtgtgtctgaccggtaaccgctacgcgaatcggcatgaacagctttttgcctttatgacctgtttctttctgaacagctttgattgaggctttgatcagctcaggcgtaaattcttcaagctcttcaagcttcgcagcaaatacgctgagcacttcaggcacctgttcctcttccagaacggcttttgcctcttgattatactcgatctcatctttaaagaacaaatcagtcagctcgacaatttcagcgccgtagctcaattgctcatggtaaagagaaattaatttacgaacccattcctgctcctcggcagaaagctcagtgccgacttttcctgctttttgcaggtgcggcagggtcagctcaaccacttgatcaagatccagcgctttgacgtattggttgttgacccatttcagtttatgcatatcaaacagagccggtgacttagacaaacgatttacatcaaaaatttcaatgaattgttctcttgtgaaaagctcttcttcaccgacgggagaccagccgagaagtccgataaagttaaacagcgcttcaggcaggtaacccagctcatcatactgctcaataaactggataattgattcatcacgtttacttaattttttgcggctttcgtttacgataagcgtcatatgtccgaagacaggaacatcccagccgaatgcctggaaaatcatgatctgtttcggtgtatttgaaatgtgatcctcaccgcggagcacgtgcgtcattttcattaagtaatcgtcaatcgcgacggcaaagttatacgtcggtgttccgtcttttttgacgatgacaaagtcgccgatgccgtctgattcaaaagaaatctcgccttttacgatatcgttaaatgcgatgattttcccttccggcacgcggaaacggatgctcggctgtctgccttcggctaaaaactgctcctgctcttcctgagtcaggtttctgtgtttgccggaatagcgcggcatttccccgcgggcgatttgctcttcacgttctttctcaagttcttcttccgtacagaaacatttataagcaagccctttttcaagaagctcttcatagtactttttgtaaatgtcgttacgctcagactggcggtacgggccgtattctccgccgatatccacactttcatcccagtccatgccgagccatttcaaatagttgagctggctttgctctccgccttcaatatttcgctttttgtccgtatcctcaatccggataataaactttccgccttggctgcgggcaaataaatagttaaaaagcgccgttctggcgttaccgatatgcaaatgtccggtcggactcggtgcataacgaacgcgtacttcatttcccatgttcaaatacttcctttcatctcgtctgtagcctctagccgaatatatgtatctattctaccaccaaatagaccgggcatcaaaacaatgatcaggctttttggatcagaacggtcgcctgagcggcaattccttcggctcttccggtaaacccgagcttttctgttgtcgtcgcttttacgtttacttgagagacgtccgcctcaaggccttccgctatccgttttctcatagcatcaatatgcggcgccattttcggcttttgcgcaataatcgtgcagtctatatttccgagtacgtaccctttttcttttacaatgttccagacatgctgaagcagcttaaaagagtccgcatccttgaattccggatcagtatccgggaaatgcttgccgatatctccttcacctgccgctccgagacacgcgtctgcgactgtatgcagcaatacatcagcatctgaatgtccgagcagccccttttcataaggaatttcaattccgccgatgatgagaggacggccttccgttaattgatgcacatcaaatccttgtccgattctaaacattatgattcccactttccgctttcatgattgcttccgcaaatatcaggtcatccggcgttgtcagcttaatattggtatagctgccttcaacgatactcacctgatatccatcaagacgctcgacgaggctggcgtcatccgtccctaagaagcctttgttttccgcttccatatgcgccgtcttcaataaagaaagacgaaaagcctgcggcgtttgaacggcccacaagcttgaacgatcaaaggtctccgcaacccgggagccttccgcccgttttatcgtgtctttcacaggaacagccaggacagccgctcccgcctcctctgctgtttcaacgagcttatcgatatgctgatgtgtgacaaacgggcgcgctccgtcatgaacaaggacgaccgagtccttatcaatcactttcagtccttcgtatacactgtgctgacgctccgcacctccggtaacaagctcaatttccgtctgaatcggaaattgggccagcagctggcgaaaatcttcccgttcactctcgtttatcaccaggattattttctgacagggtgcgtggctttcaaaaacccgcagtgtgtgtataataacaggcgcaccttttaagctgatgaacagcttatttttcccggccttcatccgttttccttgtccggcagccggaataacgacaacatattccatataaactccctcttaaagagctttctcaagcagcttgggcttggcaaaaatcattcgtcccgccgctgtctgcagtacgctggttacgagcacatcaatatgtttccctatataattgcggccttcttccacaacaatcatcgtcccgtcatccaagtaagccacaccttgattatgctctttcccgtccttaatcacctgcacattcatctcttcgcccggaagcacaaccggcttcaccgcgtttgcaaggtcattaatattcagtaccgcaaccttctgaagctcgcatactttatttaaattaaaatcattcgtcacaacgacgccggatgtcagcttcgcaagtttgacaagcttgctgtcaacctcctgaatgtcctcgaagtcgccttcataaatttcaaccgtaatatccagttccttttgaatgcgattcaagatatccagtccgcggcgtcctctgttacgttttaaaacatctgaagaatcagcgatatgctgtaattcctccagcacaaattgaggaatgacaatgacgccttctaaaaagcccgtctgacaaatatctgcaattctcccatcaataataacacttgtatccaagattttcagccttttatcctgttcctcctgctcctcatcagcacttccctttttcttctgcattcttgcagaaatggagaaaagactgatcagttcatcctttttcttaaatccgacttggaagcccaggtaaccgagaaagaaagccagaaagaccggaatgatcgtgctgaatatacggtacggaatattgtccagcggaatcacgtttacaatgagatatgcgatgataagtccaaaaaccaatccgagactcccgaataacagatccggcaccggagctctcagcaaagaatcttcaatccattttacccaattaatcacatattctgtcgtccatatactgatgagaaaaaagataatagcaccaattgcagcagacgtatatgcgtttgttattaaaggtatgtcctgtatatttgacagcacaaacaattcaggtattaaaaagataccgacaacgccgcccacaataatgaagaacgcctgaactattcgttttaacatacctccacctccttttaagtagcattttttcagcagactgggtcagagcctacaaattcagaataaacaaaaactaacaataatatacccggattccgacaggtttaagcgattcttaaagctgtctatctatatagtgtttttcctgaaggcgttttaagccttttttgatttttttggcgcgcacttcgccgataccctcaacatcatcaagctcttctacagtggcttccgttatgcttggcaaaaatccgaacgcctcaaccacattttcaacaatcggcatcggcagacgcggaattttgttcagcagcctgtatcctctcgggagcacataatcatcaagattggtagaagccggatatccaagcagcttaaacagaatggaatcatcaagcagatcatagctggacatatcctgaagctcttttaacagcacgaacggatctttgattttttctttgacatagtctttgatgaaaagtgccgcctcttcttccatgtccgtaatcagttcaatcacctgcagacggattaagtggccttccgttccgagttctttaatatacatattgatttcattttttattcggagcaccatttcatatcgatgcatgacggacagcacgtcactgaatgtcacaagctcctcaaactctaatgcgtttaaagccgtaatcgttttgtctaaaatggttttatacttctcaagcgtttgaatggcctgatttgcctttgttaaaataaatcctatgtcctttagtgtgtacttcatgctgtcctgatataacgtaatgacatttctgcgctctgaaatggcgatgacgagacagccggtctgcttcgccacccgttccgccgtacggtgcctcattcccgtttctgaagaagaaatggtcgcttccggcataagctgcgtattcgcataaagaattttctggccggaatcacttaaaataatggcaccgtccattttggccagctcgtataagtgagcgggcgcaaatgatgtattaatatgaaaaccgccatccacgacttgctttaccttatcattgtatccgacaacaatcaggccgcctgtatttgcccgaagtacattctctatcccggctctgagcggggtgcccggtgcaacgaactgcagaattgcagacaggtcaagctcttgtttcgccccttttttctctttttccatctattatgatcctcctaatgaagtacgaagcgcttctgcaacatttgctactccgacaacctcaatcccttttggtattgtccatccgtctgcattcgcctcaggtataatcatgcgcttgaagccgagttttgccgcttcctttacgcgctgttcgattcttgacaccctgcggacttctcctgtcagacccacttcaccgataaagcaatctgcgggattcggcggtgtatctctgaagcttgaggcaatgctgacggctactgccaaatcaatcgccggttcatccagtttgaccccgccggcgacctttaaatacgcatcttgattttgaagcaaaagacccacccgcttctcaagcacagccataattaacgataccctgttgtggtcaatgcctgtagccatgcggcgcgggtttccaaaactggtcggtgaaatgagcgcctggatttcaaccagaatcggtctcgttccttccattgacgcaacgatactcgaacccgatgccccggcagaacgctcttccaagaaaatttcagaagggttcagcacttccgtaagcccctcttcccgcatttcaaagatgcccatttcatttgtggagccgaaacggttttttacggcccgcaaaatacggaatgtatggtgccgctctccttcaaagtatagaacggtatcgaccatgtgctcaagcaatctcggccccgcgatcgatccttcttttgtgacgtgcccgacgataaaaataggtatgccgtttgttttcgcaattttcatcaattcggccgtacactctcttacttgtgatacactgccgggagctgaggtgatatcactttggtaaacggtctgaatggagtctacgacaacaaatgcgggtttcatctcttgtatagcagacgaaatatactccatatcggtttcagataaaacatgtaacatttggctgttgattccaagtctgtcggcgcgcagcttcgtttgcttcacggattcttcccctgaaatgtaaagcacgctgccggccgtatcagctaattgtgcggatacttggagaaggagcgttgattttccgatcccgggatcgccgccgattaatactaacgagcctttcacaacgccgccgccaagcactctgttgaattcttcgagctttgtttgaacgcggggttcttccgatgtttcaattgatgtaatgggtgatggtttttggacggtttgaacggagtgggagaaagccgcccgccgattcgccggcgctttttttatggtttcttccaccattgtattccaagccccgcagcccgggcactttcccatccattttgcggattcataaccgcatgagtggcagatgaattttgtttttgatttagccatatatgttgtaagacctcttccttatcgaatatttctctatataacaaagtgaggcatacacttgcttacgtatgcctcatgtttgtcactatattagttcgttttagcagttgtttttacgacaaattcgccgtcctcaacatcaagaacaatgtgctggcctttatcaatattgcctctgaggagttcttctgataaccggtcctccacatgcttttgaatcgctcttcttaacggacgtgcgccgtattccaaatcgacgccctcttctgccacttttgcttttgcagcatccgtcagctcgatagagagatcttgttctttcagacgttttgttaactgatcagacataagcgacacgatgtctgtaagatgttttttctcaagggagtggaagacgataatttcgtcaatccggttgataaactcaggtctgaaggcacgcttcagctctcccattactttgtctttcatgtctttatggttttgtgattcatcctgcacattgaagcccacatatttgttgcgtttcagctcgctcgctccgacgtttgacgtcataatcaggatcgtgttgcggaaatccacagtgcgtccttttgaatcagtcaagcgtccgtcttcaagcacttgcaggagtatgttaaacacatcagggtgcgctttttcaatttcatcaagcagtacgacagagtaaggttttcttctcactttttctgtcagctggccgccttcatcatagccgacatatcccggaggagaaccgacaagacgtgaagttgagtgtttctccatgtattcggacatatccactctgatcatcgcttcctcatcaccgaaaatggattccgccagcgctcttgccagctctgtcttcccaacgcctgtagggcctaggaagatgaatgaaccaatcgggcgtttcgggtccttcagaccggctcttgcacgtctgacggcctttgcaacggctacaacagcttcatcctggccgatgacgcgggagtgcagaatgctttccatattgagaagcttatctgtttccgtttgggcaattttagatacaggcaccccggtccagctggatacaaccatcgcgatatcctctacagaaacttcggagttctcctggccttgtttttctttccaggtttttttcgtgtcttccacctgttctctcaggcgctgctccgtatcacgaagggaagccgctttttcaaactcctggctctgaacggcagcgtctttttccttgcgaacttcatcgagtttctgctcaagctcttttaagttcggaggcgttgtgaacgaacggagacgcacttttgaaccggcttcatcaattaaatcgatcgctttatccggaaggaagcggtcagaaatataacggtcggacaattttaccgccgcttcaatcgcttcatcggtaatggatacgcggtgatgcgcttcatagcggtcacgaagcccttttaaaatttgaatgctttcatcggctgagggctgatccacctgaatcggctggaaacggcgctcgagagcggcgtctttttcgatatatttacggtattcatcaagcgttgtcgcaccgatgcattgaagctctccgcgggccagtgaaggttttaagatattcgacgcgtcaatcgcaccttctgctccccccgctccgatcagtgtatgcagttcgtcaatgaataaaataatattgccggcctgacgtatttcatccattacttttttcaagcggtcttcaaattctccgcggtatttcgtaccggctacaaccgtacccatgtctaatgtcattacgcgtttatcacgtaaaatttccggcacttcattattgatgatctgctgtgcgaggccttcagcaatcgcagttttacctacacccggttctccgataagaacggggttattcttcgttctgcggcttaatacctcaataacacgctgaatttctttgcttcggccgataaccggatcaagactgtcttccttcgcaatcgcagttaaatcacgcgccagactgtccagcgtcggcgtgtttgcattgctgttcgtaccggatgcagaagatcccgtctcattgcttcccagaagctgcaacacttgctgtctcgccttattcaagctgacaccgagattattcagaactctcgccgctacgccttctccttcacgaatcagtccgagaagtatgtgttctgttcccacataagaatgtcctagctttctggcttcatccatgctgagctcaatgactttttttgctcttggcgtataatgaatcgtttgagacatttcctgtccccgtccgattaagctctccacttctttctgaattttatccgaaccgagtccgagtgcttggagtgctttagccgcaatcccttctccttcacgaaccagacctaataagatatgttcagttccaatattgttatggcctaagcgcagtgcttcttcctgtgccagtgccaataccttttgagctcgctctgtaaaccttccaaacatcatatcgaatcatcctcctgtctatttgcactcatttctaaatgcagcctttccctgataagagccgctcttctcgcgtctctttcgttcggccgtaatgcaccgcccgaatattgctggagaaaacccggctgtgtcaaaatcatcagttcattaagtatattgcttgatagccctttaatgatccccaggtctatccccagccgaacgtcagaaaggcatttcgccgtttcctttgattcaatcatacggcagttggataaaacaccgtaagacctgaatacccggtcctccaattcaattttcgaggtttggtaaagcgcttctcgggctgaacgttcctgctcaatcagctgggcagccacactgtttaaatcatctacaatgtcctgttctgattttccgagtgtgatttgatttgaaatttgaaagatatttcctaatgcttcgctgccttcaccgtaaattcctctaacaactaaacctaattggttaattgccggtataattcgattcatttgcctagttaatacaaggcccggcaaatgcatcatgactgaagcccttagtcccgtccctacatttgtaggacagcttgttaagtaccctctcttctctccaaaggcgtaatccactttctcctcaatccagtcatcaacctggtttgccgcttttatggcattgagaagctggaagccggggaagaggcattgaattctgatatgatcttcttcatttaacataatgctgacttcttcattttcagaaagcagacagccgccaaaaggggattccgttaaattcgggctgatcagatgtttctccatcagcacccgtttttccaaaggctgagcttcactcattctgattaaatgaaattgaccgatatcaggcagttcttttcctgaaaagtgatcttcgaattgctgaatgatggatgaggcttcttcattcgtataccgggcgggaaactttatattttcaaagtttcgggccaaccgtatacggctgctgagtacaatgtcactttcaggtcccttttgcttcatccaattgcttagtgcgtcctgaataaaatgcttgagcgacattacccttgttccccctcactgtctttactttttaacttctgctctaacgatcggatctgatccctgacctccgctgctctttcaaactcttcgtggtgtattaaagattcaagttctttttttaacatttccatttgccgtcttacatgcaggtttccgcctattcgttttggaattttcccggcatgcaccgtattcccgctgtgaacttttcgcaagatcggcgtaatttggctgtagaacgtatcgtaacattccgcacagccgaaacgccctgtttttctcagctgctgaaacgtcataccgcatttcttacaagctgtcccttgctctgaatagccgaacatttgagaaccggtgttttgaaatgaagactccatattcagcagccctgataataaattatggatcgagaacccttggtttccacttatactgtatgaatcgctattttcttttgcacattgttcacaaatatgaacttcttgtttttctccattaacaactttcgtaaagtgaaaagtggccggtctctcattgcattcttgacaaatcaatcttttcacccgcttactttagttttaaagatgtgagcattgctttcatcattctggctcttagttcatcccgttcgggcaaatcaatatatagaactgaacgatccattacactcaccatcattttagcttctctttccgatataactccgtcctctaacagtctgagaataatgtcatcagaggctgcctgggacaagtgggtatgaatctgcgaaataatattattgatgaggacgacttcgttattcattttaattttgataatacgaatatacccgccgcctccccgtttactttcaacaatatatcctctttcacttgtaaatctggtgttgatgacataatttatttgggaaggaacacattgaaatttatcagcgatttcactgcgtttgatctctaaaatttctttgccattttgatctaatacttgtttcaagtactgttcaatgatgtcagaaatattatgtcccactcaaccccctccttcattgactttgactatatttgactttaaccttactataaggtgtttcgcaaaatttttcaactgtatcgctctatctctattatttccactttgcacaagcataaaacctgcttttgcaaaaaggcatatcgttacgtttctcatattatataatgtatgcagaaaaacacaaaaaaggcagctcataatgagctgcctttaccgtaatgatagcttggcggcgtcctactctcacagggggaaacccccgactaccatcggcgctgaagagcttaacttccgtgttcggcatgggaacgggtgtgacctcttcgctatcgccaccaaaccattgagagtgttctctcaaaactagataacagtaagcatacattcaaattggttaagtcctcgatcgattagtatctgtcagctccatgtgtcgccacacttccacctcagacctatcaacctgatcatctttcagggatcttacttccttgcggaatgggaaatctcatcttgaggggggcttcatgcttagatgctttcagcacttatcccgtccgcacatagctacccagcgatgcccttggcagaacaactggtacaccagcggtgcgtccatcccggtcctctcgtactaaggacagctcctctcaaatttcctgcgcccgcgacggatagggaccgaactgtctcacgacgttctgaacccagctcgcgtaccgctttaatgggcgaacagcccaacccttgggaccgactacagccccaggatgcgatgagccgacatcgaggtgccaaacctccccgtcgatgtggactcttgggggagataagcctgttatccccggggtagcttttatccgttgagcgatggcccttccatgcggaaccaccggatcactaagcccgactttcgtccctgctcgacttgtaggtctcgcagtcaagctcccttgtgcctttacactctgcgaatgatttccaaccattctgagggaacctttgggcgcctccgttaccttttaggaggcgaccgccccagtcaaactgcccacctgacactgtctccccgcccgataagggcggcgggttagaaggtcaatacagccagggtagtatcccaccgatgcctccaccgaagctggcgctccggtttccaaggctcctacctatcctgtacaagctgtaccaacattcaatatcaggctgcagtaaagctccacggggtctttccgtcctgtcgcgggtaacctgcatcttcacaggtactataatttcaccgagtctctcgttgagacagtgcccagatcgttgcgcctttcgtgcgggtcggaacttacccgacaaggaatttcgctaccttaggaccgttatagttacggccgccgtttactggggcttcaattcgcaccttcgcttacgctaagcgctcctcttaaccttccagcaccgggcaggcgtcagcccctatacttcgccttacggcttcgcagagacctgtgtttttgctaaacagtcgcctgggcctattcactgcggctctctcgggcttgcaccctaacagagcaccccttctcccgaagttacggggtcattttgccgagttccttaacgagagttctctcgatcaccttaggattctctcctcgcctacctgtgtcggtttgcggtacgggcacctctcacctcgctagaggcttttcttggcagtgtggaatcaggaacttcgctactataattcgctcgccatcacagctcagccttcacgggaaacggatttgcctatttcccagcctaactgcttggacgcggatatccaataccgcgcttaccctatcctcctgcgtccccccattgctcaaatggtgaggaggtggtacaggaatatcaacctgttgtccatcgcctacgcctttcggcctcggcttaggtcccgactaaccctgagcggacgagccttcctcaggaaaccttaggcattcggtggaggggattctcacccctctttcgctactcataccggcattctcacttctaagcgctccacaagtccttccggtcttgcttcacagcccttagaacgctctcctaccactgttcgaagaacagtccgcagcttcggtgatacgtttagccccggtacattttcggcgcagagtcactcgaccagtgagctattacgcactctttaaatggtggctgcttctaagccaacatcctggttgtctaagcaactccacatccttttccacttaacgtatactttgggaccttagctggcggtctgggctgtttccctttcgactacggatcttatcactcgcagtctgactcccaaggataagtcatcggcattcggagtttgactgaattcggtaacccggtaggggcccctagtccaatcagtgctctacctccgagactcttaccttgaggctagccctaaagctatttcggagagaaccagctatctccaggttcgattggcatttcacccctacccacacctcatccccgcacttttcaacgtgcgtgggttcgggcctccattcagtgttacctgaacttcaccctggacatgggtagatcacctggtttcgggtctacgaccacgtactcaattcgccctattcagactcgctttcgctgcggctccgcatcttctgcttaaccttgcacgggatcgtaactcgccggttcattctacaaaaggcacgccatcacccgttaacgggctctgactacttgtaggcacacggtttcaggatctctttcactccccttccggggtgcttttcacctttccctcacggtactggttcactatcggtcactagggagtatttagccttgggagatggtcctcccggattccgacggaatttcacgtgttccgccgtactcaggatccactcaggagagaacgaagttttgactacagggctgttacctcctatggcgggcctttccagacctcttcatctacctcgttcctttgtaactccgtacagagtgtcctacaaccccaagaggcaagcctcttggtttgggctggtcccgtttcgctcgccgctactcagggaatcgcatttgctttctcttcctccgggtacttagatgtttcagttccccgggtctgccttctcatatcctatgtattcagatatggataccactccattacgagtggtgggtttccccattcggaaatctccggatcaaagcttgcttacagctccccgaagcatatcggtgttcgtcccgtccttcatcggctcctagtgccaaggcatccaccgtgcgccctttctaacttaaccgttaaaaagaatcactacgtgatatcttgcattacaattgaatgtgaattacttctgttatctagttttcaaagaacaacatctcgaagaatcgaatgatccttcaaaactaaacaagacagggaacgttctgtttataagacccaaggtcttatattccgttaaaatccttagaaaggaggtgatccagccgcaccttccgatacggctaccttgttacgacttcaccccaatcatctgtcccaccttcggcggctggctccataaaggttacctcaccgacttcgggtgttacaaactctcgtggtgtgacgggcggtgtgtacaaggcccgggaacgtattcaccgcggcatgctgatccgcgattactagcgattccagcttcacgcagtcgagttgcagactgcgatccgaactgagaacagatttgtgggattggcttaacctcgcggtttcgctgccctttgttctgtccattgtagcacgtgtgtagcccaggtcataaggggcatgatgatttgacgtcatccccaccttcctccggtttgtcaccggcagtcaccttagagtgcccaactgaatgctggcaactaagatcaagggttgcgctcgttgcgggacttaacccaacatctcacgacacgagctgacgacaaccatgcaccacctgtcactctgcccccgaaggggacgtcctatctctaggattgtcagaggatgtcaagacctggtaaggttcttcgcgttgcttcgaattaaaccacatgctccaccgcttgtgcgggcccccgtcaattcctttgagtttcagtcttgcgaccgtactccccaggcggagtgcttaatgcgttagctgcagcactaaggggcggaaaccccctaacacttagcactcatcgtttacggcgtggactaccagggtatctaatcctgttcgctccccacgctttcgctcctcagcgtcagttacagaccagagagtcgccttcgccactggtgttcctccacatctctacgcatttcaccgctacacgtggaattccactctcctcttctgcactcaagttccccagtttccaatgaccctccccggttgagccgggggctttcacatcagacttaagaaaccgcctgcgagccctttacgcccaataattccggacaacgcttgccacctacgtattaccgcggctgctggcacgtagttagccgtggctttctggttaggtaccgtcaaggtgccgccctatttgaacggcacttgttcttccctaacaacagagctttacgatccgaaaaccttcatcactcacgcggcgttgctccgtcagactttcgtccattgcggaagattccctactgctgcctcccgtaggagtctgggccgtgtctcagtcccagtgtggccgatcaccctctcaggtcggctacgcatcgttgccttggtgagccgttacctcaccaactagctaatgcgccgcgggtccatctgtaagtggtagccgaagccaccttttatgtctgaaccatgcggttcagacaaccatccggtattagccccggtttcccggagttatcccagtcttacaggcaggttacccacgtgttactcacccgtccgccgctaacatcagggagcaagctcccatctgtccgctcgacttgcatgtattaggcacgccgccagcgttcgtcctgagccaggatcaaactctccgataaagtagtttgactgactacgcacatcgctgtgcgatttatttaaaactttgaattaacaggtgcgttttgtcttgtttagttttcaaagatcattttgttcactttctcaagcaactttttaagtatataataagtttctcttaaagtcaacatgtttttttataaatggtggagcctagcgggatcgaaccgctgacctcctgcgtgcaaagcaggcgctctcccagctgagctaaggccccgaagtggtcgggaagacaggattcgaacctgcgaccccatggtcccaaaccatgtgctctaccaagctgagctacttcccgatttttaaaaatattatggcgcgcccgagaggagtcgaacccctaaccttttgatccgtagtcaaacgctctatccaattgagctacgggcgcataacaatgaatgccgagggccggacttgaaccggcacggtagtcacctaccgcaggattttaagtcctgtgtgtctgccaattccaccaccccggcgtggatggtatagttggagcggaagacgggattcgaacccgcgacccccaccttggcaaggtggtgttctaccactgaactacttccgcatacaggataactatcctgtataatgcgggtgaagggacttgaacccccacgtcataagacactagatcctaagtctagcgcgtctgccaattccgccacacccgcgtaacatggtgagccatgaaggactcgaaccttcgaccctctgattaaaagtcagatgctctaccaactgagctaatggctctttttaaaagacttatgttattatcttgtccaaaaatggtgccggccagaggacttgaacccccaacctactgattacaagtcagttgctctaccaattgagctaggccggcaaatatggtggaggatgacgggctcgaaccgccgaccctctgcttgtaaggcagatgctctcccagctgagctaatcctccatatattacacttacgtgtaatagcttggcggcgtcctactctcacagggggaaacccccgactaccatcggcgctgaagagcttaacttccgtgttcggcatgggaacgggtgtgacctcttcgctatcgccaccaaaccattgagagtgttctctcaaaactagataacagtaagcatacattcaaattggttaagtcctcgatcgattagtatctgtcagctccatgtgtcgccacacttccacctcagacctatcaacctgatcatctttcagggatcttacttccttgcggaatgggaaatctcatcttgaggggggcttcatgcttagatgctttcagcacttatcccgtccgcacatagctacccagcgatgcccttggcagaacaactggtacaccagcggtgcgtccatcccggtcctctcgtactaaggacagctcctctcaaatttcctgcgcccgcgacggatagggaccgaactgtctcacgacgttctgaacccagctcgcgtaccgctttaatgggcgaacagcccaacccttgggaccgactacagccccaggatgcgatgagccgacatcgaggtgccaaacctccccgtcgatgtggactcttgggggagataagcctgttatccccggggtagcttttatccgttgagcgatggcccttccatgcggaaccaccggatcactaagcccgactttcgtccctgctcgacttgtaggtctcgcagtcaagctcccttgtgcctttacactctgcgaatgatttccaaccattctgagggaacctttgggcgcctccgttaccttttaggaggcgaccgccccagtcaaactgcccacctgacactgtctccccgcccgataagggcggcgggttagaaggtcaatacagccagggtagtatcccaccgatgcctccaccgaagctggcgctccggtttccaaggctcctacctatcctgtacaagctgtaccaacattcaatatcaggctgcagtaaagctccacggggtctttccgtcctgtcgcgggtaacctgcatcttcacaggtactataatttcaccgagtctctcgttgagacagtgcccagatcgttgcgcctttcgtgcgggtcggaacttacccgacaaggaatttcgctaccttaggaccgttatagttacggccgccgtttactggggcttcaattcgcaccttcgcttacgctaagcgctcctcttaaccttccagcaccgggcaggcgtcagcccctatacttcgccttacggcttcgcagagacctgtgtttttgctaaacagtcgcctgggcctattcactgcggctctctcgggcttgcaccctaacagagcaccccttctcccgaagttacggggtcattttgccgagttccttaacgagagttctctcgatcaccttaggattctctcctcgcctacctgtgtcggtttgcggtacgggcacctctcacctcgctagaggcttttcttggcagtgtggaatcaggaacttcgctactataattcgctcgccatcacagctcagccttcacgggaaacggatttgcctatttcccagcctaactgcttggacgcggatatccaataccgcgcttaccctatcctcctgcgtccccccattgctcaaatggtgaggaggtggtacaggaatatcaacctgttgtccatcgcctacgcctttcggcctcggcttaggtcccgactaaccctgagcggacgagccttcctcaggaaaccttaggcattcggtggaggggattctcacccctctttcgctactcataccggcattctcacttctaagcgctccacaagtccttccggtcttgcttcacagcccttagaacgctctcctaccactgttcgaagaacagtccgcagcttcggtgatacgtttagccccggtacattttcggcgcagagtcactcgaccagtgagctattacgcactctttaaatggtggctgcttctaagccaacatcctggttgtctaagcaactccacatccttttccacttaacgtatactttgggaccttagctggcggtctgggctgtttccctttcgactacggatcttatcactcgcagtctgactcccaaggataagtcatcggcattcggagtttgactgaattcggtaacccggtaggggcccctagtccaatcagtgctctacctccgagactcttaccttgaggctagccctaaagctatttcggagagaaccagctatctccaggttcgattggcatttcacccctacccacacctcatccccgcacttttcaacgtgcgtgggttcgggcctccattcagtgttacctgaacttcaccctggacatgggtagatcacctggtttcgggtctacgaccacgtactcaattcgccctattcagactcgctttcgctgcggctccgcatcttctgcttaaccttgcacgggatcgtaactcgccggttcattctacaaaaggcacgccatcacccgttaacgggctctgactacttgtaggcacacggtttcaggatctctttcactccccttccggggtgcttttcacctttccctcacggtactggttcactatcggtcactagggagtatttagccttgggagatggtcctcccggattccgacggaatttcacgtgttccgccgtactcaggatccactcaggagagaacgaagttttgactacagggctgttacctcctatggcgggcctttccagacctcttcatctacctcgttcctttgtaactccgtacagagtgtcctacaaccccaagaggcaagcctcttggtttgggctggtcccgtttcgctcgccgctactcagggaatcgcatttgctttctcttcctccgggtacttagatgtttcagttccccgggtctgccttctcatatcctatgtattcagatatggataccactccattacgagtggtgggtttccccattcggaaatctccggatcaaagcttgcttacagctccccgaagcatatcggtgttcgtcccgtccttcatcggctcctagtgccaaggcatccaccgtgcgccctttctaacttaaccgttaaaaagaatcactacgtgatatcttgcattacaattgaatgtgaattacttctgttatctagttttcaaagaacaacatctcgaagaatcgaatgatccttcaaaactaaacaagacagggaacgttctgtttataagacccaaggtcttatattccgttaaaatccttagaaaggaggtgatccagccgcaccttccgatacggctaccttgttacgacttcaccccaatcatctgtcccaccttcggcggctggctccataaaggttacctcaccgacttcgggtgttacaaactctcgtggtgtgacgggcggtgtgtacaaggcccgggaacgtattcaccgcggcatgctgatccgcgattactagcgattccagcttcacgcagtcgagttgcagactgcgatccgaactgagaacagatttgtgggattggcttaacctcgcggtttcgctgccctttgttctgtccattgtagcacgtgtgtagcccaggtcataaggggcatgatgatttgacgtcatccccaccttcctccggtttgtcaccggcagtcaccttagagtgcccaactgaatgctggcaactaagatcaagggttgcgctcgttgcgggacttaacccaacatctcacgacacgagctgacgacaaccatgcaccacctgtcactctgcccccgaaggggacgtcctatctctaggattgtcagaggatgtcaagacctggtaaggttcttcgcgttgcttcgaattaaaccacatgctccaccgcttgtgcgggcccccgtcaattcctttgagtttcagtcttgcgaccgtactccccaggcggagtgcttaatgcgttagctgcagcactaaggggcggaaaccccctaacacttagcactcatcgtttacggcgtggactaccagggtatctaatcctgttcgctccccacgctttcgctcctcagcgtcagttacagaccagagagtcgccttcgccactggtgttcctccacatctctacgcatttcaccgctacacgtggaattccactctcctcttctgcactcaagttccccagtttccaatgaccctccccggttgagccgggggctttcacatcagacttaagaaaccgcctgcgagccctttacgcccaataattccggacaacgcttgccacctacgtattaccgcggctgctggcacgtagttagccgtggctttctggttaggtaccgtcaaggtgccgccctatttgaacggcacttgttcttccctaacaacagagctttacgatccgaaaaccttcatcactcacgcggcgttgctccgtcagactttcgtccattgcggaagattccctactgctgcctcccgtaggagtctgggccgtgtctcagtcccagtgtggccgatcaccctctcaggtcggctacgcatcgtcgccttggtgagccgttacctcaccaactagctaatgcgccgcgggtccatctgtaagtggtagccgaagccaccttttatgtctgaaccatgcggttcagacaaccatccggtattagccccggtttcccggagttatcccagtcttacaggcaggttacccacgtgttactcacccgtccgccgctaacatcagggagcaagctcccatctgtccgctcgacttgcatgtattaggcacgccgccagcgttcgtcctgagccaggatcaaactctccgataaagtagtttgactgactacgcacatcgctgtgcgatttatttaaaactttgaattaacaggtacgttttgtcttgtttagttttcaaagatcattttgtctttcgttcaagcgactttattattatatcttatcaatctcttgaagtcaacaactttttaaatttcttttttcgtcagcgccttgtttagcggcaacgaataataatataccacctcacaaataatagtgcaatagttttttaaaagaaaatcaaaaaagttttacgagcggcttgtttctaaaaaagcgccgtactgcgataagcagaaacggcgccttcccttttattagcgttgtctcatttgagggaataataaaacgtctctgatagacggagcatttgttaacagcatgacaaggcggtcgataccgatacccaatcccccggtcggcggcatgccgtattcaagagcttcaacgaagtcttcatccatcatatgcgcttcatcgtttccttcttctctttcttttaactgcgcttcaaagcgttccctctggtcgatagggtcattcagctccgtaaacgcattagcgtgctcacggccgacgataaacagttcaaaacggtctgtaaagcgagggtcctccggatttttcttagcaagaggagaaatctctacagggtggccgtaaataaatgtaggctgaatgagtgtttcttcaattttttgttcgaagaattcattgatgatatgacccaccgtcattgagtttgtgatctcgataccatgctcttttgcatgaccgcgcgcttcttcaacagtcatctcattccagaaatctacacctgtcgcttctttgaccgcatctaccatgtggagtcgtttccattcaggtttcagatcaatctgctcttcgccgtactggattgtggtgcttccaagcacttcctgcgcaatatgtgctacgaggttttccgtaaggctcataatatctttataatcggcgtacgcttcatacagctcgatcatcgtgaattcagggttatggcgtgtagaaacaccttcattacggaacacgcggccgatttcgtagactttttccaatccgccgacaatcaggcgtttcaggtgcagttcaatcgcaatacgcatataaagaggcatgtcgagcgcattatggtgcgtgatgaacgggcgcgcagacgctcctcccggtatgctgtgcatcgtaggtgtttcaacttctaagtatccatggtcatctaagtatcttctcatcgcttggatgattttgctgcgtgtgataaacgtttgtttgctgtcagggtttacgatgagatcgagatagcgctggcggtaacgctgttcaacgtcttttaacccatgatatttatcaggaagaggacgcagtgcttttgtcagcagttcaaaagatgtcgctttgacagaaagctcgcctacgtttgttttgaaaactttccccgtgatgccgataacgtctccgaggtctgaagatttaaagatttcatattgttcttcgccgacactgtcttttcttacgtaaatttgaatttgaccttctaagtcctgcagatgcgcaaagccggctttcccttttccgcgctttgtcatcatacggcctgcaatggtcacttcgaccgctttttcttccagttcttctttagaaagctcctggtaggcgtcaatgatctgttgagattgatgcgttctctcgaaacgttcgccgaaagggtcaatgccgttttctctcagctggttcattttatctcgtctgacttgcagctggtcgttcaattcctcatgattttgctcttcttgactcattggtatcactccgttacattttgatttcacgaaaaagcagaaaaactgccagcggtaagctggcagtgagcagcaatagagggtgtatattaacctacttttgcatcttgaagctcttttgcctctgcttcggcggtaaatgcatctaaaagctgcacaacttcttcacgcgtctcacattggttaatttcgttgcgtacattcgcattgcctctgacacctttcagataccaggcagcgtgttttctcatttctctgactgccacattttcgccttttaacttaatcaggcggtctaagtgcagtttgcataccgacattttttcacggactttcggttcgtcttttaactcgccggtttcaaggtagtgcaccgtacggtaaatcatccacgggttgccgagtgcggcccggccgatcatgacgccgtcaactcctgtttcctcaagcatgcgtttcgcgtcctgaggcgttttgacatcaccgtttccgatgacgggaatggagacggattgcttcacttctttaatgatatcccagttcgcagtgccttcatacatttgcactcttgtgcggccgtgcagggcaacggcttttccgccggcacgttcaacggcttgggcatttttcaccgcataaatgtgctcttcatcccaacccattctcatcttcactgtaaccggcttatcaacagcatctactactgcggataccatttcataaatcttatcgggatcgagaagccatttggcgcccgcatcacattttgtaatcttgggtacgggacatcccatgttaatatcaataatatcagcagtcgtgttttgatctacaaacttcgccgcttccacaagggtttccttttttcctccaaaaatctgaaggctgagcggtttttcacgttcatcaatgtaaagcatccccattgttctggcgttattgtaaagaatcgctttgtcactgaccatttcagcgcataccaatccggctccgaattcctttacagtcaatctgaacgctgagttgcagacaccggccataggggcaagcacaacccggtttttcaattgaatatcaccgattttaaacatttttcccctcctttcatttgtctatttttcaggcggggccaattcgtccgcacttatatttaaaacatctgccgcatcttgaatgatggcatctgacggcaaccggtttccgcgttcaatttcaccgacaatagaaactgatatacctaatgcttttgcaaatccttcttgagtataacctttcagctttctgaatgcacgaattcgcctaccccagatttctgcttccatactcttacaccttcttggtttgtttcagcgcttatcgtgatatgatccgcctgcgggcatatttcttttaacggcgcaaggacaaataagcgctcatacattctcggatgcggaacaatcagccgctctgtttcaatattttcacgattatacagcaaaatgtcaaggtctgccgtccgcggtccccagcgaatctctctcgttctgcctaattcagcttcaatgctctgcgttacatcaagaagttcaaaaggagataacgacgttttcacttcaaccgccatattaagaaactgatcttgatcctcatagccgacgggatctgtttcatatatggaggacacctttgacaccgtcacgccatgatgccggctgagcatggccactgcctgacgcaaataatgttcacggtcgcccatattggaaccgaggccgatatatgccgtattgttcatgatttctttctcgtcatttctatggctactgatttataatggccgggaatcggcgggtcaggcttaacaacttttaccgtacattgctgcaccggctcaaatttctcaaggacggtgtctgcgatccgttccgcaagcgtctcgaccaaattgacgggttcgccctcaacgatgccgcggcagacactgtacaattccgcatagttaatggtataagaaaggtcatccgtttttcccgctttgctcaaatccagttcggcagtcaggtctactttgaagcgctggccgagtttgttttcttcttcgaacacgccgtgatatccgtaaaactccataccttccacatatactttatccataatgtacgcctcctttgttcaacatagcatccatcatcttcgtcattcttgcgatctctttgacatcgtgcaccctcacaatgtcgcagcctttttggacgccaaggcatactgtcgctcccgttccctcggcacgttcttcagggggaaggtcaagcacacggccgatgaacctttttctcgatgtcgccagaagcagcggataacctaacccgctgaacacctccagcttgttcatgacagccagattgtcctcatagtttttcgcaaagccgatccccggatccagaatcatattttcatctgtgacgccggcttccgcggcaatttttacgctttccatcaagtctgcaagcatatcaggaataagatcgttgtagtttctttccatgcggttatgcattaagataatcggaaccccgtgtgcggcggctactgacgccatgtcaggatcacctttcgccccccagatgtcattaaggatagaggctcccgctttgaccgcttcgtctgccacggacgctttgtacgtatcgattgaaagcggaatgtccagctcgcttgtgatccgctctatgacagggatgactcgtgacatttcctcatcagccgacacgagtgatgcgccgggtcttgtcgattcaccgccgatatctatgatatgcgccccttcttcagccatcttcgccgcatgcagaagcgccctttccgtactgtcgtatttgccgccgtcagagaaggagtctggcgttacatttaatatccccataacgagcgtcttctctttataggaaagagtgcctttttttgtatgaatcagtttaggatgttcaattgtttgctgcgccattttgttcctcctcctgtacattcattttgtttatttcctgctgatactgcttacggagcaattgcaccgtttttccgctcactccgggcagcggcacttcctctattttagaaaacgggatgatttcaagcacggagtttgtcaaccatgcttcatccgcttcaagcattgattgaaaacggaatcgaccttcggtgacttctgtcccctgccgtttcaattcatcaatgacaaactgtctcgttacaccatcgagaattcccgtatccaaggatggcgtaaagaccttgtctccttttcgccaaaacacgttggagacaatgccttccgcgacatctccttctccggtcaggaaaatgccttcaaaattgggatcattcccgatctcccgtttagcatacatgttgtttaaatagtgatgggattttaaccggaaatatccttcaggcgtatttctcctgatagagagaagcctgccttctttttgaacaggcagagtttccggattgagccggttgacgaaacaaaggacggtcggcttttcataagtctgcgcggcaaaccctttatcgctgacgcctgccgagatgttaagccggacacgcgcgctgccgtccttgatctcattgaggagcaacagtctccgaagcatatcaagcagctcctgtttgttcacctcatatgcaatctgcagatcccgaagcgccctgttgagcctggcgacatgcgcatccggcagaaacggccggccgctgtaaagcctgaacgtctcgaacgcgccgatcccgtacagataaccatggtcaaaaggagaaagcgccgcttctttctcctctatatattgaccattcaaatatataatcacaccgtcacttcctttttgcggtgtgtctctataaagtttctgagcatctctttgccgaaggaggtcatgatggattccggatggaactgaacaccttcaacaggcagctcattatggcggattgccataatttctccttctttggtttgagcggataccgtaaaacaatccggcagcgtgtccgctttgacaataagtgaatggtaccgggtggcgacaagcggattttgcaggcctttaaaaatcgtctgtccgtcatgcataacttctgacgttttgccgtgcatgagccgctccgctctgacgacgtcgccgccgaatacttgcgcaatcgactgatgtccgagacatacgccgaaaataggaatactgccggcaaaatgtttgatcgcttcgaggctgatccccgcttcatcaggactgcacggcccgggtgaaatcattaagaagtccggacccagctcttcaatctgctcaatcgtaatctcgtcattccgtctgacgatcagttcctccccgagttcacccaaatattgaaccaagttgtacgtaaatgaatcataattgtcaatcattaaaatcatctctgctcacctcgtctgattttttgtctcttcttcgctcagctctaacgcctttttcatcgcaaaagcttttttgaacgattccttgtattcatgcttcggaaccgaatcaatgaccactcctgctccggactgcataaaagcatgtccgccggctgcatagatcgtccggatcacaatgttaaactgcaaatctccgttaaatccgaaccagcctatagatccagtataaagcccccgtcttgtcggctcaagctcttctataatttccatcgttctcactttgggcgctcccgtgatggtgccccccgggaataccgcatgaataatgtctgtcgcgtcatatccgtcctgcagctctccctgtacgttcgacacgatatgcatgacgtgggaatacttttcgatcgccataaattcgttaacccgcacggagccgtagcgcgatacgcgcccgaggtcattgcgctcaagatcaacaagcatgacatgttccgcacgttctttttcgttgtgaattaattcatcagccaaagccttgtcttcagcatcgtcttttcctcttgaacgcgtacccgcgatcggtctcgtttcaagcttcttccccttctttgtcaccaatagctccggcgacccgcatatcacttgaaaccccggtgtctcgagataggccatgtaaggagacggattgacgtttctcaagtgtttatacacctcatacggatgaacggataaggactgagactgcctgatggacaaattcacctggaacacatcgccgctcgtgatatattgtttaatttgttctacagcctgtgaaaatccttcctcagtgaacggagcggcgtacgatccgtccccattccgattcagcggtgaaaaaggctcgtccgccgtttggagggaacaccacatgtcctctaagcgggacagcttttcttccgcaagatccgcttcttccgcttcagtatgggtaatgagccataacgcctcttcctcatggtcataaacggccacatcatcaaaaacaagaaagtaaatatcaggtgtttccagatcatctaacgacagcatcttaaaattctcaatatatcgggcgtagtcgtaactgataaaaccaatcgcaccgccttgaaagtccggaaactcaacgtttgtttccgttccgagcgttccaaaccattcatgaaaggcccgcagcgggtcaccttctttaaacagtgtttccccctcatgcttgatcgttgtaattccgtcttttcctctgacggacgcaatcggatctagaccggctatactgaatcttccccctctcgcgctttcgagcagaacatgccgttttctcgatttcgaaaggttttcatatcgctgtaaaaatgcttgtttcgtaaaaggtatttttcttcctgccggtctgcgttgtgccatcatatcaatcctctgcttcgttttactgtagttttattttaaagcaatcacactggtgaaaaaagtgaatttcacttccaaccataaaattcgaaacgttttttggattttcgatgcttcaggcacaaaaaaactcccggatacagccgggagccgtgtgtatgtctctattcaaactgataaagcggtgtgcttaagtaacgttctccgttactagggatgatcgcaagcactttcttgcctttccccaattttttcgcgatttccagtgccgcgtaaatggccgctccggaagaaatgccgccaagaatcccttcttcttttgccgttttacgggcatattcaaatgcatcctcgtttttgacgggtatgatctgatcatagatgtccgtattcaatgtttcagggacaaatcccgctccgataccctgaattttatgcgggcccggttttccgccggaaagaactggagaatccgccggctctaccgcatagattttgatggatggatatgcttctttcagcacttcgcccgctcccgtgatggttccgccggtaccgattccggccacgaacgcatcaagctggtcgtcaccaaactgttctacgatttctttccctgtcgtttggcggtgaatttccgggtttgccgcattgttgaattgctgaggcacaaagtatccgtgttcctcggcaagttcttccgcctttttaatggcgcccttcattccttctgcgccgggagtcagcacaagctccgctccgtatgcgcgcagcagattgcgtcgctccatactcattgtatcaggcataacgagaatggctctgagacctttagccgctgccaccatcgcaagaccgattcctgtatttccgcttgtcggttcaatgattgtgtcgccggcttttaattttccttctttttcagccgcttcaatcatcgccactccgatccggtcttttacgctgctgcccggattcatgtattcaagcttcagatatacatctgcactgttttcatccgtcaggcgattcaatttcacaataggagtatttccgattagttcagtaatagaatttgcaatacgcaccatgttggacacctcaatttccgactaaatttattggtattataaatataagttatcaatttcaaaattttttgtcaatcatttagttcttttttccccgtagaaccaagagacccccgcctctttccacagcgttttgactgtcgccttgtcacctaattgatccatcgcgatctggcgtctgatttggctcttcacttcattgtatgagaaagttctcgatttaagcttttctttcagctgaatgacggcgtatcctgaagaaactttaatcggttcagcggaccattcatcttctttaagatttttagcttctgtgatatatgcctgcgggatattttcctgattttctgtcacaaagccgaggtctccgccatactgtgacgtgtatctgtccgtggaacgctcagcggcgacggcttcaaagctggaaccgcctttcaaatcagcaagcaccctgtccgcctcatctttgtttttgacgacaatgtgccggattctgtaggaatcatcaaaatggtacaattctttatttttattataaaatgattgcatttccttatccgatatatcgatgtccttcgtcagcagttcttcaagaagaatgttgtagcggatctggtctctccattctttttcggtaatatggctgtcttcataaaatgaattatctaccgctttgattaaaagaaattcccgctccaattcgctgtttgaaactgtaagtttattctttttcgcaagctcttccactacttctgcattaatcatgtcttccagagttgattttccgtactggtcttccatctttttcatccagtcttgccgtgtgatatgtttatcaccgattgtcgcgatggattcttcagatgaccccgcggcttgggattttgttaacttatacgccactatcacactgcatactaacagcgccgctacaataatcgtcaaaagtgttctcgatttcaaaatctaccccatcccttttataaaatagaacaacccgctaaagagctagcgggttgtttcgtcacgaagctcttccagttcttcttttgtaaataaatatttctcattacaaaaatggcaaaccgcttcggcttttccgtcttcttctatcatatcttgtatttcttttttgcctagtcctaaaatggccgtttcgaatcgatcttttgaacaagaacagtgaaatttgaccggcattgtttcgagaacgtccggtttttgacctagaacttcttctaagatttcttccggtgtcaggcctttttgaatcaattttgaaattggttcgatttgagataattgcttttcaattgttgaaatggtttcttcatcagtccccggaagaagctgaatgatgaacccgcccgcagcgagaatggtgttatcaggatttactagaacacctacgccgacagatgaagggacttgttcagaagaaacaagataatatgtgaagtcgtcaccgagttcacccgagacaatctctacttgtcccgtaaaataatcacgtaagcccaaatcttttacgacactgagtgttccgtcagttccgaccgcccgtctgacatccagtttcccttgttcattgagatcaaaatgaacgtgcgggtttgatacgtatgctcttacctcaccctttgcgttcgcatctgcgacaatggctccgatcgggccgccgccttctattttgactgtcagcttatcttcacccttaagcatcgctcctagcatcagagaagctgtcatcgtccggccgattgcggctgatgccgtcggccacgtgtcatgccttctttgcgcttcattaaccatatctgtcgttctggctgcataagcccgcactttaccgtcatatgcaattgctttaattaaataatccatcgtttacctcctatacgtgacccacgcgatttcgctcataaatgatttccagccctttcagagtgagaaacgggtcaacaatatcaatacaatctgattcgtttgcgattaatgacgcaagcccgcctgtcgcaatgactttcggttcctgtgttgcctgccatttcatccgctttacaatgccttcaacttgtccgacatagccgaaaaggatgccggactgcatggcgcttaccgtgtttttgccgatgatattgtccggacgggcaatttcaattcttggaagcttcgccgcacgtgagtacagcgcttccgttgaaattgtaatgccgggagcaatcgcgccgcccatgtattgtttgttttcatcaatgtagcaatacgtcgtcgccgttccgaaatcaacaacaattaaggggccgccatactgctggatcgccgcaacggcattgacgatcctgtcagctcccacttctttcggattgtcatactttatatttaaacctgttttcattcccgggccgacaacttgcggctcgatgtgaaagtattttgtgcacattctttctaaagagaacataatcggcggcaccacggatgagatgataatcccttcaatctgttcaaacatgagtccggaatgttcaaataaggagcggagcagcatgccgaattcgtcttctgttttgtgcctgctcgtttctatgcgccaatgatattctaattccccatcatgatatacaccaatcacggtgttggtgttccccacatctataaccagtaacaacctctatcaccacttttgaatagtttctaatcataacattttcaacattctacaataccatacacgatctgcggctcttttgtaaacaaaacggaaccagtaaaaaaaccgccggtatacgccggcggttttcatatcagaaagcgaactattctttcggctcgtctttcttttcgtcttctgttttagacaggatgtttactttcacatcgtctttttgaagatggtcatctgagaaattgcgctcagggagttttccgtgatccacgagatgcttgatttgttccgcatctaatgtttccacatcaagcaatgtctgagcaatcaattcaagcttatcacgattttcagtcaggatggttttcgcacgctcataacattctttaatgatgcgctgaatttcctgatcgatttcgtaagcgatctgatcactgtagttttgctcgttgttgaaatcccggcccaggaatacttgaccgccttgagattgaccgaactgaagcggtccgagtttttcagacataccgaactctgtcaccattcttctcgcaatgttcgttgcccgctggaagtcattgtgagcgcccgtgctgacttcgccgaagataatttcctcggcaacgcgtccgcccagaagaccgacaattttatcgagaagttcaggttttgtctggaagtaacggtcttctctcggaagcatgaccgcgtatccgccagcctgccccctcggaacgatcgttactttatgaaccatatcggcttcatccagcacaagtccgataacggtgtgaccgccctcgtggtacgccacgatattgcgttcttttttcgagatgacgcggctcttcttcgcaggacccgcaatgacacggtccgttgcttcatcaatgtcgcgcatatcaattttcttcttgttttgacgggcagcaacgagtgccgcttcgttaagaaggttttctaaatcggcgcctgagaaaccgggtgttcttgaagcgattgcttttaagttcaccgtttcatcaagcggtttgtttctcgcatggacctgtaatacggcttcacggccgatgacatccggacggtctaccgtaatctgacggtcaaaacgtcccggacgaagcaatgcagggtcaagaatgtccgcacggtttgtcgcagcgataataatgattccttcattcgcactgaaaccgtccatctcaacaagcagctggttcagcgtctgttcgcgttcatcatgcccgccgccaagacctgcgccgcgctgacgtcccaccgcgtcgatctcatcaatgaagatcagacaaggcgcattctttttcgcattttcgaataaatcacgcacacgggaagcaccgacaccgacaaacatttcaacgaaatcagatccgctgatgctgaagaaaggaacgcccgcttcaccggctgaggctctcgcaagcagcgtcttaccggttcccggaggtccgaccaacagcacgcctttagggattctggcgccgagctcggcgaatttgcgaggatctttcagaaactcaacaacctcaacaagctcctgcttctcctcatccgcgccggctacatctttaaacttcacgcgtttcttttcttccgtatacagcttcgctttgctctttccgaagttcatgacacggctgccgccgccctgagcctgattgagcaggaagaaaaacagaataaagatgatgacaaacggaatgatcgtcgttaagaacgtcacccacccgcttgtttcctgtgcgggatcaacttttacgtccgtctttttaattgcatcaaatatctggtctgctccttttccttcaggaacatgtgttaaaaagtactggtctttgtcgtattttttcagctgtccttttacctcataaacacctctgacaggctgaaccgatacgctatcaactttcccttcatcgaggttcttgataaacgtactgtacgacatattttctgttttcgggtttgaagtctggaagtaactcacaaccccgattactactaataaaataagtaaataaaaaatggtattacggaagacccgattcattccttacctcctcccacagtaagcacaactatgttcaatagtaccatagaaaatcattccaatacaaccgataaccatctcggaagcaggcagccgatcagctttcataaatcgccggttttaatactccgatgtaaggcagattgcgatagcgttcggcataatcaagtccgtaacccacaacaaacgcgtcaggaacttcaaagcctacgaagtctgctttaatgtccgcttttcttccgcttggtttatccaacagggtaacaatcttaattgatttcgctttacgatatcggaagagttctacgagatagctcaaggttaacccactgtcgataatatcttcaatgattaagatgtcccggccttctacagatgtatccaaatctttgatgattttgacttctccggaagaaaccgtggaatttccgtagcttgatacatccatgaagtccatttccaaatatgtatcaatatgctttataagatcagccataaaaggaagcgctccctttaacacaccgattgccaacggaaacgtgtcgctgtactcgcttgttaattgttctccaagctgttttactttcttctggatctcatcttctgagatcagcactttttcgatatcctgtttcatgttaatgcttgccccctacacttttcatgctgtctatattgtaatacaatgcggtcactgtttgaaatcacaagatcgtcaaagatggattttttcaagccaggcagccagataatttcaccgctcgcatccgttacaatcggccattcgtcccgatcccgcagaggcagtttatgatcaataaatatatctttcacctttttcgagccattcatccctttaagtttgatccggtcgccgatttttctcgtccggattgttaaaggaaattgcaccttgtttctgcttgtcataaaaacagcattcccatttttgatatgagggtcagcctgatcggccacctctatcataaagccgttggggagaacagcagtctcgccttccgctccttgcagctgcagctcaaagggaactttttcacattgccattgttcaaatgtaaacaaacatgtctgatatgatttgaccaccttcagccctttcggaaaatcaagcactcccgaggcgcttccattttccgcccattcgagaaactgctgtatgtggcgggcggaaaacgacgatggaacgttttcataaagatagtttaatattagttgaactcctcttctttgtaaaggtatcggaagggcaagcaattgagaggaattgacttcaaccgatgtgtcagacttgcttgtaataaccttattcattcgttctttcgttaatgactgcaggtattgttcgtcttctgtcagtgcttcactcaccttttgaaacattttatgaacgtcaggtgattcatgttttaaaaaaggaagcacggtctttctgaatctgtttcttgtataatcgtcttttgcattgctctcatccgttctgtagctgagcccttcttgacggcagtattcaaggatttcatcctttgccgcatagaggaaaggcctgatcagccagccggatgcaaattcgcggacgggctgcattcccgcaagccctgccccgagcgtacctttcgcaagcctcatgagcattgtctcaacctggtcatcgccgtgatgagccagcgccaaaaacttcgcttggtgttttgtcatcagatcttcgaaaaactgatatctgcaatcacgcgcggcagcctgcttgttcagcttattcttctttgcgtatgcagaaacatcaatctgtaccgtttcgcagaggatatgttccgcttcgcaatatgactgcacaaacttcatatcttcttcagattcaggacccctgaactgatggtcgacatgcgccgctatgataacggaagaatgcccgaagtgcttattcagcatactgagaagcgccattgaatcagggcctccggagaccccggcaataatcgtttctccctccgcctgaagatgatatgttttgaaaaaatcttccacgcttttcacaatgtccccctcacaatgagcaggttttttaaagatatacatatcctatcactttcattccctccaagcaaagaagaagcatgagcgcaggcgtccggccggcactagatgagaaaaaagacgatgtaagcgaaataaagggcgagaacgctgattaaaataagtgttgtttcaaacaaaccattgtgctttgcgggtttttgtttaggtttataccgcgtttgagatacagtgccctgccgcggttttgattgcggcggcttaggcttggcggcggctttccttttactccctgcactctgccccgccgtcaggatgtcatgcttcatggcttccgcagacggatattggccgtttaaagcagaaaacagaaccttcttatacttattcagaaacgggtggccttcaatgatagaacgaagctgttctttcggctgtcctgactttttgcactctttcttctggacacagtggatcatgatcattgcgacagcaaacaggtcataggatggttctgcttttcttgttccatacccccaatagcccctgtcgtaaaactccgtatactctttaatcgcgcggccctgttttgtcgttccccctacatcaatgcagcgaatggcagccggtggtccggttacaatgagattgtccggtttgaggtcgccaaaaacccacccttgctgatgaaggactgacaggctggaaagaagctgcaccatcagcaccggaatccactccgctcccttactgctgatatattgcggaagaagcggcccttctatgtactccatcacgtaaaaagagacatttttattcagctgcggaataaacgcgtcatccgcatcaaaaaaagaaggccccatcgtttgcgaccgggcctttgaaaaggattttaagacattcacttcagaggtaacagacatgctgtcgctgcttattttcaaagcgacctgtccgcctgatgcttctgccagatatacaataccgttagccccttttccaagctgtttgagcaatctgtaggatttgccgttccatttgccctgaattgccgtccccggtgccagactacatgccaaactcgttaaagcgtcgttcatcatctgccaacatgctccttcttgagcggattctctcaaactgctgcgtcgcttcccggatagcggggcccgtaggggtgataccgccggtcgacagcttcgcaaagagtgcagaaagggattcaagcttcggcgtccaattcagcacaagctcaacttcctggcttttcccgggaaatatacacattgcaaattcattttgcccggcccgggaatttaaactgatggaaagatcgatcagcgcttctttcaccgtcggcagtttcggcgccatactcgcactcgtatcaaccagcacaagcacttgcagatgaaccgtttcgccgagttcatcaaccacttccatcacttcgccgcgtttttcaggagaaagctcttccatttcaacgtttttccctaagatttgtttaagctcttgattgacgacaccttgcagcgtctgggtcattgcttttttcgtcaccatttgaaccgtctgagacaattgtgacgcatacacaacttgatggacgccgcctccggccatggcgatgccttcaacttccttcattgcctcttggtcaatcgcgttttcttccataattcctataacattcaccgtaatcccctgctccttggcgaaagccgccattgcgatcgggtcttcaccatgattggagcagccatctgtaatcagcagaacttgatttaaatgtcccttattcacatacattcctcccggtgatacgattagtcccatcttcgccagaaggaaagtgatttatacgaaatgattaagaaatctcctttttattttggaaaaccgccggcaccggtatggaagcccatttcggcgtgttgtggtcaatccggacaacaaccactgtcatatcgtcttcgatttggccggaacgcgttctgatgacctcttccattaatatatcagcgatttcttgcgggtcttcggttttcagccctttcattttccgtttcatccacaggtcgtggttttcaacgtgcttcggcccttcaaaaataccgtcactcatcatgacgagcagatctcccgcttttaactgttcacttacaacctccacgtcaaattcattgatgatgccgatcggcagattgctggcctgcactttcatgacttgatctccccgcttgataaaactcggcgttgaaccgaccttcaagaatttgcagcttgcatcctgaagatcaatgatagaaagatcgagagttgagtagatttcgtctgtcgtccgtaaagacagaatactgttgatcgtttttatcgctattttttcatcaatacctgattcgagaattttttcgagcaacttaatcgtttcattgctctcataatgggccctcgccccattgcccatgccgtcactgatcgcggccgcatattttctcgcccccagttccatcatgctgtagctgtcgccggagacaaggccgccgccttttgccgcatgagccgcgcctgtcgatacccggtacgacttggtcgaaccgaacgcaacatggctgtagccattcggatgagtcgagtgctgttcgcttttgacaagtatctgctcctcaagaatgtcagacagcatcggggcgataattttctcactctcgccgtgtcctccgctgaacgggattgtcatttcgatatcaatattgccctgctccaagctgtatatctcgacatgctgaatctcgattccgaaatgctgaagcgcctctatcatttgttcttcctgaataaaatgctgctccctctcccgttttatttcccgagaaaagtccgccatgacctcagaaacccccaacagctgctcggcaacaagccttctgctgtcctgaacttttctcttcagtgtcagatgggcgtgatggtgggcaagttcgtcctcaatcagctcttccacctgtctggatttggaacagtgctgttgaaactccttttttaatctgcggtttgaggcatactgtttttcttctgtttcatgcataacttgtttcattaagtcatatgttttatcaaagttttgaacccagcatttgcttttcttatagcaggattggcaggaatgctccgtgattttgcttaaaaagagatccacttccccttcttccgcctgctcatcagaagacgtctgatgaaaggtggcgaagctctccgacaaggcatgaaacacattggagaactggtctactttctgggcggtgacatctctgattttcctcgcgtactgctgctgttcctgactgtgctcagcagtgcccggtatgtatcgcgccacctttttcgtaatcgattggggcgtaatcaaaaacaaaacaacggcaatcaaagattcataaagagtggtcattaatccggcagatccttctccatataatgaaatcagcagtgagccgatcactaacccgactgcggctccggctttctttccttctttcagcagcccgccaagaagcccggaaaacgcaagcagactcatttgatagaggttcccgatattcgcaagcccgaggatcagtccggtcaccacaccgaccgtacagccgatgcttgccccgccgacaaaggaaaaactcagcacgacatagcgggccaggatatgttcagcctgcattccctgaaatgaaacaccggcaagcccggttaaaacggatgcgatcaagatcataaaacagatgatttcttctatttttaacgtttgcttcacttttttgatcgtgaaaatcggcaggctttgcaaaaagatcagcgtcaaaataaaggccaggcccgcctcgacaacagccatcacataatcataggtggtaaaagcgccgctctcaaaataaacaaatccgattctcgcggcagccatagagaaaaacaccacgatcggcagcatcttcacccggtcctgcacgatatatgtaccgatttttgaaagtagagtgaagacggccaaagctgtgagaatcaataaagagtgtttcggcgaaatggttaaagcgcccgcaagtaaagacagacaagcatagaaggctttatctcttctgatcaaaagcatcgctccgaaaaacggcagcgcaaacggaagaacctcagataatatgaaagcccgtccaagtaaaaaaccgatcacgacataaatgaaacccttatagaaaaaaagtgaatgcgcttgatggactgtaagctttgccgccttttcaaaaaacgattgcagtttttccagagcttgtcccgccatcggcccgttcactcttctttccgctttttccattgctctcatcccccacctgttttattcgttgcttgtcattataaatgaaagcccagataggattttgtcaaaagaaggtaacaattccaaagaactcttcgacgctttctcccttgttcccctttcctttcgtatttcctccgacatttctcaaaaagttgtctaaatatgaaaaaatcggcttctgcaacagaagccgattcgcttgatgacccgtacgggattcgaacccgtgttaccgccgtgaaagggcggtgtcttaaccgcttgaccaacgggccagatatatatggtagcggcggaggggatcgaacccccgacctcacgggtatgaaccgtacgctctagccagctgagctacaccgccatataggtgcttataagcacaagttatataatacaaaggtttcttcattccgtcaacagaaactttaaagttttaattttctgactataatggcgcgtacaaaaaaagcacccgctgggatagacggatgctccatgtatttatagaaagcagcaagttatcctcttcttgctccgcgccctccacgttttgattccgtgtttcgttttaaagatgataagcggtcttcgctatctttaagaaacttgttcattttctgttcaaaagattctttcggacggaaatcatttctaggtctggcttgcggacggtctttagcttttttaattgataaaccaattttcccgtctttttcaacgttgatgactttcacttcaacttgatcgccgacttttaaatgctcgttaatgtctttaacataattatcggctacctcactgatatgaacgagaccggttgagcctccaggcaattcaacaaatgctccgaaatttgtaatacctgttattttcccttgcaacttgctgccaacttcaatcgacataaaaaaagtgctcctccttaggcttataaaaagatcgtttgtttaattatacctaaataaaaatttaagtgtcaacaaggctacttgctcttcttttctacattgaagagaatctcaccatttcctgacataaacaagtctcttctggcaagctctgtgacgtaatcctcatcctttaatttggaaatttcatcttttaaatcagcctgtttcgcgttcaattctttcacttgtttttccagctgagctttcttttcttcgtttgcgctaagggaagaggtctgtgaccacagagaacccgctaagacaatagccgtcaacaacacaagggcgccgaatacgatcaaccgtctgaaaagccctttccgccttcttttcataagctgggattgccgttcaacctgctctttatagtcgttttggatttcagttattgtacgttctctagatagattcaaaccagacggtcctcctttcaccttttcaaaatacgtatcatggtcgatctgattgttatgattagtttcttgctcttttgtaaaaatcctgcacttttttgaaaatatcgtttgaaagtaagacgccacttttcaggaagaagtttcaataattgtttcaacaggaaaaacagcggatacagcaaaaacgttacgatcttaaaaagacacttcgcaaaaaaggcactcacccgataggagtataaagaaataaccgtgatcagcccgatgagcagcttaaagagcagaagcaccggacggaacagcacgtgctgaatgagcttttttgcgaattggtaaagagacaccgcaagatgaatggcaaatttcagtatttttatatacattcgtttaaacaggctttggtacgtcgcaatccccagtaagacagccaagaaaatgtataccctgagttccccttcattcacgttgagcagcacatagaaaaacagcagaccttgtacaatccaaaagagaatgtcatgaatgaataacagccatctggccgttttggcgcggctgacaaacagcctgtatgtatcaagcgacgctccgagccaggcgcccataccggtcattgccagcatcgtataaaattgggtggtcagcgtcatttaaacaacttgctaaaaaaccctttagctttatccccttgctgctcgtctaaatatacaaggtcaaacaccctgccttttatagatacaatccctttttccacatcaagatttttcatctgcaggttctcgcctctgacggaaagcattcccataaccgtttccagcaaaaactcttcgttgtcaaaactttctacatgcttgacgcccgaaatgtctaaatgctttctccctttcatcgttacatcatgctgttccggaacagaagaagaacctttttgctcataatatgaattcatctattcagcccccatatcctcgatacttttagcattattactgcattgtatgagacgggagccttgtttagaacaagcctattcgccgagtttttcttccttgacgattgtatacatgcccgcggcttcttcttttttcgttgtttctttcaattcgtttaccttcacggtgacaagcttctggccgaagcggaccgtcagttcatcgccggcttttacgtctgagctggctttcgcctgattcccgttaactgtgattctcccttgatcggcgacctctttcgccaatgtgcggcgtttaattaatctggatacttttaaaaacttatcaagtctcatatcagaatctcctctccatttcttttgcttcatcccacaatttgtccatttcctcaagtgacattgcggtcaattcaagtccctttgctgccgcttctttctcaatataagcaaagcgtctgcggaatttgtcatttgtcatggcgagcgcttcctcaggctcaattttatagtatcggccgatattgaccaatgcaaataaaacatcgccgaattcagcttttaagctgatttcatctgctgattcggcagaagcctctgcagaaaattccttcagctcttcatttactttatcccatatatcctgaacgtcatcccagtcaaagccggtttttgcggcttttttctgaagcttggccgcttttgcaagagaaggcagtgttttcggcacggcatccagcaatgaagtggatgttgtttgcttttccgcctttttgatttcttcccagttggcgacgacatcatgttcatcctgaaccttaacatccttaaacacatgcgggtgccgtctgaccatcttcgcactgatgtctctgatgacatcatcaattgagaaatacccctcgtcttctccgatctgggcgtgcagcataacctgaagcatgacgtccccgagttcttctatcatgtgatccgtgtcctcttcgtcaatggcctcaagcagttcgtagcattcctcaatcatatatttctttaatgactggtgtgtctgcttttgatcccacggacagccgttcggcccgcgaagctcgcgaataatacttcggaatgcagaaaattcctggtaaaggagttcttcttttttaatcggcggaacatacacgcttgttaagttatttatttctacattgcggtcaagctcaaacaaaggcaccttggtcatcttttctcccttgcttccggctgccgtgacgatgaccacttcatagtcgtcaggcaatttctccataagcgtcagcttcacctcagaggccgtcatttgatcataaacctggcaaatgatcaggtgatggcggagttcgagctcatccggcgtcattgtttgcgcatccgtaaattgaaacccttcaatcggatcaattcgcaatgcattaaaagtggcatccaaaaagctttgccctccggcagtatgaacagctacctgttgttcttcccggcgttcaaataacagctgaacggttttctcagcgacaaacggatgtccgggaacagcgtagacgacatcctcttgcttcgctttttcaaacagaatgtccgcgatctcttcatagaccgcttcaaactgatcatgtttttcataaatatcatcaaaataccggatgtccgcttccgtctcttgctctaattccggaatcaaagggtggtctttcgttcttatatataaatgcttcgcctgagtcagcagcttatgtatgcccactgtcaactgatccatgtctccggcgccgaggccgacgaccgtaatgttacctgccatgtttttctctcctctttttcaatttgcttaaagcactgccgaaaggaaggccgctcagctcttcgtccgtgaaaatcttcattcttatcatacaataaataaacaatagccctccgatgactgacgcagacagactctcacatacagctccggccctgctgacgggaacaaataactgccatagcttcatatatacgagcagaaagaagaccatcagcagactgcaccagcacagacgggcaatcacgccgccgatattcgtcagccagcccttcgaccaaattctccggagattcaggcacgcaactgcggcaaatgccaagacggtcgccagtgccgctcctctaataccccagccggggaccagccaaacattcagcacccatttcagcgcccctcccgccaaaacggatacggcggggaaaacggtatgtcccgctccttgcagaatcgcggctgctgtaagcgcaatcgaggcaaaaaagatagataagctgaatatttgtaaggtctgcgtcccctcactgttttggaaaagcatgatattcaccggctctaaaatgcaaaaaagcccggctgatgcaccgatccctaccgcaaggcagagcttgacggctgatgtcgctttctcttttatgataaacggcttattctcatgcaccgcttttgaaattgaaggaaccaatgacgcggcgatactgacggcaaacacggttcccagctgaaggagcggctgtccgcggtcatatatgcctttcagctgtttcgcggcatggctctccgtcccgtctgaaagcagtgaatataagtttaaggcgtctacaagctgaatcaaaagcatgagtacactgctgatacagatggtgactgaataaagcagcagcttttttacaatgacggccgttgcgatatgtccgccgtctttcttggtttcttcccgcttataccagaaaacagccaatacacaaagggctgccaagcttccggcaattgatcccgaggccgcccccgcaccagcggcgtataatgaacggccgcttttcaaaagccagaaggataaaccgagaagcaccgccacgcgaagaagctgttccgtaatctgggataaggctgacggcatcatatcatgcacgccttggaaatacccccggaaaaccgccgtaaacggaaacagtatgaaagcgaacgccgcgacccttatcagcatcacaaggcgggcgtcacccataaaaccggccaacggcgccgcgccgacatacatgagcgcaaacagaacaagtccggccgccgtgacataaagggcggaaattttcagtattttttgtttctgatcgctataatcgttcattaattttgagatgataaccggaaaaccggatgttgacagcatgaccgcgatccctaaaaacggatacacctgctgataaatgtaaaatccgacgtcaccgacaatattctgaaaaggaaccctgtacacggcgcttaatatcttcgttacgatacccgcaacgacgagcacaaaagcacctttccatgccgattgccgcttggcgccaactgaatcgttcatccaaaagctccttccagccgctagaaaatcacgtctataaaacgagcttattatatcacaatcctaacggccgaaccgatagagagcacatatgaatatgaaaaagaacagcacttgtataagagctgctctttctccgttttcttatttcaataatggtaataagacctactgctccatttgtctcgccaaaaaactggctgccgtttctaccgctttatgttctacttctccaagtgcctgttccttggaaaagatgaccacggcaccgataggatcgccatttgccacgatcggagctattgtataggagctcatatcttcatcaatgtcattaacaagctgcgcggacttcacgtcgttttctaccactgagctgcgctgatccatcgttttttcgagcaaatcgctgatggctttgttcagaaattcttttttcgaactgcctgaaacggcaatatacgcgtcacggtcgcaaatcaagacggaatggccgagactgtcatacaaagcatctgcatattccttcgcaaaatcgccaagctcactgataggagaatactttttcaatataacttctccgtcgcggtcaacgaatatttcaagcgggtctccttccctgattcgcagagttctccgaatttctttaggaatgacgacccgtcctagatcatcaatacgacgtacgatacctgtagctttcatctctctggtgcctctctttcatgtgatgatatttaagggaaagtactaaagctctttactttatgtagcttccgccactcgcttgaaattagtatccgtcacatcaaatgtaatatacaccagagagtaacaatttttatgaagacgcgattgtttctttcttcacatcctgaaggcctttcagcatgccgagcacggtctccagccactcttccgttttgcggcctttcgtctgtactgagattttcagctttttcccttccattcccagtccgatctgccggccgtatttattgccgagttcgaacaatttctgaccgtcaatctgtgcgctggcctcttcagaaatggtaaatctgatcgcgtctttatcctgcttgatgagttcgacgcgttcatattttccgtataccttcatctcagcaaccgtaaacagccattcaacctctttaggatagctgccgaacctgtcgatgatttcatcttgaagctcatttttctcctcaattgtggcgattgacctgaagcgtttgtacatgtcgattttttgcttgccgtcttgtatatagttttcaggaatatacgcgtcaagctcgatatcaatttctgtctcaaactgttcgcttttcggaatatcgcctttccgctcttcaatcgcttccttgagcatttgcgagtacaggtcaaaaccgactgagtcgataaagccgtgctgctgggcgccgagaaggttccccgctcccctgatcgtcaagtcacgcatggcgattttaaagcctgatcccagctcggtaaattctttaatcgcctgcagccgtttttccgccacctcagtgagcactttgtctctgcggtacgtaaaatacgcgtaagcgacgcggttggaacggccgacccgtcctctcagctgatacagctgagacagccccattttgtctccgtcgaacacaatcaaggtattgacatttggtatatctacgcctgtctcaataatagtcgtgctgacaaggacgtctgattccccttccagaaaattgagcatgacgctttccaattcattttcggtcatttttccgtgggcatatgccactttcgcatcgggaacaagcatggaaatttcatcagccttccgctcgatgtcatccacgcggttgtacaagaaatatacctgtcctccgcgcgccagttctctttcgatggcttcccgcacaagcgcgccgttgtattccacgacatatgtctgaacagggaaacggttttccggcggcgtttcaataacagataagtcccgcacaccgagcatggacatatgaagcgtgcgcggtatcggcgtcgctgtaagagtcagcacatcgacattggctttgatctgtttgattttttccttatgcgttacgccgaagcgctgctcttcatcaatgatgagcaagccgagatctttatagacgacgtctttagataagagcctgtgggttccgattacgatgtctaccgttccgtttttcaggcctttaatcgtttcattggattcttttctcgttctgaatcggctgagaagaccgatgttaatcggatagtcctggaaacgctccataatggtttcataatgctgctgcgcgagtattgtcgtcggcacaagaagcgcgacctgctttccgtcggcgatcgctttaaaggccgctcggatggctacctccgtcttcccgtaacccacatcaccgcaaagcaaacggtccatcgggcgctctctttccatatcctttttaatctcctgaatggaacggagctggtcctctgtttcctgataagggaaagcagattcgaactgccgctgcatttcatgatccggcgagaacgcatagcccttgcttgcttcccgttccgcataaagcttaatcagatcatcggcaatatcctgaacggagttttcaacttttttcttcacccgtttccattcactgccgcccagtttataaagcttcggttcttttccttcagagccgacgtacttctgcacctggtcgatttgttctacagggacgtacagcttatcgctgccctgataatgaatgttgaggtaatctttatgaatgcctttgatttctagtgtttcgatccccaaatacttaccgatcccgtggttgacgtggacgacatagtcaccgacctgaagctcggaatagcttttgatccgttcggcatttgtcagcttctgctttctcggctttttcttgattcggtttttgaacagctcttcctccgtaatgacggccagcttcatcagcggcagttcaaaaccggattgcagctcgccttccatgacatagacctgtccttgcacaagcgctttggagctgtccgtttttgcggcttcaatttcgtaatcagccagcacggatgccaatctgtcggttctgtccttatttgcgcctaaaaagacgacggtgaagtttgatttcttaaagcgctccatttcacctgcgagcacattcatctgcccgtgaaaactctgcatctgccggcttgtcacattcacgatattctgagggcttgtatgctggacatgacgcaaaaataatgaataataaatagccgggcgccgcttttcgctcataagctcctgaaagctgaaggataaatgaatgtcatgcagaattttcccttcctcgagcagacttgtcataaattcggcctcttctttttgcagctgatcctccatttcatgaatgcggctgacctcgtctaacagtaacaacgtgtctgccggtgtataatctagcaaactagcaggtttttcgtaaaagtacgagagatacttcacaagttcctgatcagtctgtcccgttgataaccgttctttatcatgtgagatattgatatgaagcatttccttttgtttgtcctgcttcagctttttcagactgtcggcaagccctttatcgagcctttccatcgcccgggctttttcttccgccctgatgatcaattccttcgccggtccgatcgccacatgtttgagcgtctcaattgatctctggtcatcagaattgaagcttctgatggaatcgacctccgtatcaaacagttcaattcgcaccggatgctccgacgtcagcggataaatgtcgataattccgccgcgaatactgaattcaccgggtgcagaaaccatatcggaacgctcataccccacctctacaaggcgcgcggacagctgatccggttctatttcgtctccgagtgaaatgacgagctggctgcttttccacagctccttcggcggaagcattcttctcactgccgcaacgggcgccacaacgaccggcgcttctccgtttgttaatctattaatgacatcaagccgctgagcacgcagttcagggctcgctaccgcaatttctgaagaaatcaattcattcacggggtataaaaaaacagattgatccccgagaagcgccgtcagatcttccgtcactttttgggcctgatataaattatgggtgataaagaaaatcggccttttcgtttcctgtgcaagggcagaggtaaaaacagaacgcgcggaacctgacagacccgcaagcagctgttccttcagcccctcatgtaaaccgttgacaatggatttaaaatcatcgctttctttaataaaggtttgaatgttgtccatatgggccctcctctctattttctgcaagaacagaaaaacgctttggtctagaatctacaccaaagcttcttattgaataaatgtgttgtgttcatggtagtgcggattgcgctccagcgcctcttggcagtcttcacaaattgtaagaacatggacatctccattgtctttatatgaaatcatatcgtttctttcctcatttgttaagtgctgaaatccaagtgactgtgtcggcaccgtcgaatattccaggctccctaccttaaagccgcagtggcggcagaaataatgcaaagccatacgttggacctcctgatgtgaaaaaatcatttttccctagtatggtctcccattatttatcttatacatttgcattaaattcgttcatgacttctaaaaatggtttcgttaaggaagcttcgcaggcttttacggtttttgtgacggcatcattgatatgcggcgcttcttccttcgtaaaagctcccagtacatagtcaacgactttcattccgttgacggggcggccgattccgattctgacccggtcaaattcaggggttccgaggtgctgtataagcgatttaattccgttatgtccgcctgcgctccccttcgtccggagcctgatttttcccgtcggaagatcaaggtcatcgtatatgactttcagatcttcatgatcggcatcataataatccagtagcggccgcaaacattcccctgataaattcatatatgtaagcggtttaacaagtagaactttttttccggaaacaaacccgattccgtaaagtccgttgaatttcgttttattcaattcaatattccattctttagaaagctcgtcaatggccataaagccgacattatgtctcgtgttctcataggttttcccggggttaccgagaccggcaatcacaagcatcgtaaatcctccctcaacatcgctgtaattcttctcattctagcacaaaagacgtaacctcgggcgggttacgtcttaaagcgcttattgattttctccttcgggctcttccccaggagacggttctgcatcttcttcgaatgcttcctgcttaggaggaaggatggaagccacgacttcttccggatcgtttgtaaatgtataattgccgtcagcagtcagatttgcgatggtcagcacatcattcatttcaagcccggaaatatcaacattgattgtctgagggatgtccttcggcttagccttaatcgaaagctcatgcagcggctgctggatgacgcctccgtctttgactcccttcgcctctcccgtcagctgaatcggcacctcggcctccagctcctcactcatattcacgacttgaaaatcggcgtgcgtcaattcgtttttgagcgggtctgtctgaagatcagtcaccataaccgattgctgatttccgttgacatcaattgtgataatcgtgttttttccttcgtcccgcaatgttttaagcaattcaacactgtctaaagagacaggcgtgttcgttatttctttaccgtatataatccctggaacatgtcctgaatgacggattttccgaagcgtcgaacgtttaaaatctgttctttcatttgcttttaaagttgccatattcagcaccatcctaattatcgttttatcgtcctattagaacaatacccacaataactgggatttaaaccttaaagtttcggtttagctgaataaatagctgacagattgtttctcgtgaacgcggataatcgcttcagccagaagcggtccgacagaaagctgcttaaagcgttcgatttttttctcatcaggaagcttaatgctgttcgttacgacaagctccttgattttagagttattgatccgctcaacggcaggacctgacagtacagggtgcgtacagcatgcatacacttctgcagctccgttttcaaccagcgcgttagcggcaagtgtgattgtgccggccgtatcaataatatcatcgatcagaatcgctgttttaccttccacgttaccgacgatgttcatcacttctacctcattcggtctaggacggcgtttgtcgataatcgcgatcggcgctttcagacggtccgcaagtttgcgggcgcgcgtcacaccgccgtggtcaggagaaacaatgacgatatctttcaagtctttaccttcaaagtaatggcctaaaatcggaacacccattaagtggtcaatcggaatatcaaagaaaccttgaatttgcggcgcgtgtaaatcaagcgcgatcacgcgtgtcgcacccgctgtttcaagcaggtttgcaaaaagttttgccgtaatcggttcacgtgatcttgcttttctgtcctggcgcgcataaccgtagtacggaatgacaatgttgattgttttcgcggaagcgcgctttaaagcgtcaaccataatcagcaattccatgatgtgctcgttgaccggcgcacttgtagactgaatgatatagcaatcacagccgcgaatactttcttctatgttgatctggacctctccgtcactgaatcttgtaacagagcactttcctaattgaacccctacattatccgcgatttcttttgcaagttctggatttgaattcaaagaaaaaatctttaaattcttatctccgtattcgttagacatggtaaacctccgattttaggattattttttatgaatgtttttcacataatcttctttatttacttgtcttgctctggcaatggcaagcgcttcgcccggcacatcttcagttacggttgaacccgcagcgacgtacgcgccttctcccactgtaacaggagcgaccagattggagttgcagccaataaaggcgccgtcttcaattttggttaaatactttttcttcccatcataattgaccgtgatggagccgcagcccagattcacatccgtgcccacttcggcatcaccgatatagcttaaatgagatgctttgcttcggtcgccgaattgtgttttcttgatttcaacaaagtttccgatcttcacttcattgccgattgcggaatcgggtctgatgtgagcaaaaggaccgatatttacatcattcccaactttgctgcgattgacaacggattgtttaatcacagtgcggctgccgattgagctgtcctctatctcagtgtgggggccgatgacacattcatcgccgatttcagcttgtccctttaacacagttccgggataaataactgtatcttgtccgatacgtgcgtcaggtgagatgtacgtattcatcggatcgattaaagtgactccgttctgcatatgccgtttgttaatacgctctttcatatacatttcagcctgagaaagagcgactctatcattcactccgagcgtctcttggaagttaccagtctggtaagcggcaacagtttcgccttcgtctttgaggatttcgatcacatccggcagataatactcgccttgggcattttcattcgaaacctgttcgatgacacgaaaaagagcctcgttatcaaaacagtacgttcccgtgttaatttctttcacaagacgttcttgctccgaagcatccttgtgctccacgattttttgaacggcgccgtcttcactgcggatgattcttccgtatccggcgggatcgtcggcaacggccgttaacaccgtggcttttgcacctttgtctgtatgttcattcagcatggcttccatcgtctccgccgtcagaagcggtgtatcgccgcaaataacgatcgtgacacccttttctccgtgaagaaatggttttgcctgtttgaccgcatgagccgtaccgagctgttctgcttggagagcgtaatcgcttttctgtccgagctgcttcttcacatcttcggcgccgtgtcctacgatggtgacaagcttcgctaaagataatttcagagcttcgtctgcgacgtgctctaccataggctttccgcataccggatgaaggaccttgtaaagcttcgatttcattctcgttccttttccggcagctaaaatcactgcaaaccgcttatccatttaatggcctccaatatcccttttatccatagaaaaatatatcctaaatagctgttgatttcaagaagacatcaaaaagtgcaagaattttctatgtaatcgctttattactgaaaaatcagatttaaaaaaggactgccggaaaaggccttgtgtcagcctttatcagcagtccttacattttgttatgtttaagaagccccggcttcttcatattctaatgcttcagaatcacccaaacgatgatactcatttaaaacagcatcctggatcttgccccgcgtgctggaattaataggatgagcaatatcgcggaattctccatcaggggtgcgtttactcggcatcgcaacgaaaagaccattgtttccatcaatcacacgaatatcatgtacgacaaattcgtgatccagcgtgatggatgcaatcgctctcatgcgaccatcggtattcacgcggcgtaatcttacgtcagtaacttccacagtagttcaccaccttttccctatataaaagcattagtctaacaattccacgattctttttaaattcctgcacgtttcaaaaagtttttttgaaaatataggatatacatacacaattaggtgataaaccatatttggggatcatatactgcataaaaaaagtgatcccggagaccggaaccacttttctgagatttaagatttcaccagcgcaatgacttcaatttccacgagagcgtctttcggcagtctcgccacttccacacaagaccttgccggcttatgtacatcaaagtattgtccgtacacttcattcacttccgcaaactgctccatatcagcaataaacaccgttgctttgacaaccgtctcgagagaagcgcccgcttctttcagcacagcttttaaattgctgaacacctgatgcgtttgttctgtgatatcaccgtttaccatttctccttcagcagtaagaggaatctggcctgagctgtaaaacatgttgtttacgatgattccctgtgaatatggcccgatcgctgccggcgcgtgttttgtatggattgcttttgtcatttttctgtctccccattctttaaatgctgttctttaaaaaatcgcagaaaattgccgttttgaatctcaatcgttttgtctttcatattgatggttgaaagcgtgagcagtgacatgtattcatcgacaagccgttcgttcactccctcggcttcaaccaagacgcctattcccgcaacgtttgcattaaactcatcaagcaggctgatcatgccgttaatggtgccgccggctttcataaaatcgtcaataatcaaaacgttcgaacccgtagccaaacttcttttcgcaagcgacatcgtttgaatgcggttagatgaccctgatacataattgatgctcaccgtggagccttccgtcaccttattgtcttttcgcacgatgacaaccggaacgttcagataactggccgctgcgtaagcaagagggattccttttgtcgcaacggtcatcaccacatcaatctcccgctccgcaaaaacggaagcaaaaagcctgcctacatgagagaggacagatggttttcctaagatatccgttaaatatacataaccgcccggaaggatacgctcaggatttactaaagactgtcccagctcctgtataaacgcttctgcttcagcctgtttcactttcggaatgtatttgacgcctccggcagctcccggcactgtaagcagcgtcccaatgccttgctgttcaaaggtctgtttaataatcgttaaatcttcactgattgatgactttgctgattgataccgttctgagaaaaacgttaacggtattaattcatgcggatgggttaacaaataatttgttaagtccaccaatctgccgctgcgacgaaacttcatgaacttacccccaaaatccgaataatttaaaaataatataacttaacatacggatttaatcaagagcattctgttcgccgatcatccgcaccgcgtacacttgatcacagaaacctcttaacccgttataaatccgctgcaccttcgattcgtattgaaccaaaccgaatacagtcggtccgcttccgctcattaacaccgcatcagcgccgaagcgtttcatttgatttttaatcatcgccacctcgggatggaggctgagcgtaaccgactccaatacgtttcctaattgtccgcataccttttggaagcttttttcttcaatcgcgtcaatcatcgcctgcacatcgggatgccgaacctgctgtaagttcagccggcggtacacttcggcagtcgataccccgatcgtcggtttggcgagcacgacccagcaatgaggcggagcactgatgtgcctgatcttctcaccgcgtccggttgccagagcagtgcccccgtatacacagaaggacacgtctgaaccgatttcagctccaagctccgcgagctcttcgacagaaagctttaaatcccaaagcctgttcagccctctgagcgtggctgccgcatcgctgcttccgccggcaagccctgccgctacagggatcacttttgtaatcataatggaaacgccttttttgacttgaaatcgttctttaagcagtttggctgcctgataagccagattcctttgatcatccggaacaaagcgattatgcgacgccactctgataacgttttcgggcagttctgtcagttcaatccgatctgccaaatcaattgtcgtcatgatcatctccacttcgtgataaccatccgggcgtttactcgtcacatcgagggacagattgattttggccggcgctttttctaaaatacgcatagctttcacctacttctccatctaaacataagtatgaacattgtatcacatttggagacccggaggtacttatccgaaattgaagccggttttgacagccgatagaaaaaaccggggaacggattgtcccccgggccactgcattatcggttattttggttctgagccgccatctgctgttcggcaatctcaatcgcgcgctttaccatattcccggcgtcacgcgcccgaatgcctccccagccctcgtttttcaccgtatcgtaaaaaccaaggtccttcgccagctcatatttgaactcatctgacataactccacgacgtctgcccaaacgaaacaaccccttttatagaattgatcaccattcgtgcacgccacgataaaacatgtgacacttatagcttccgtttaatcggctgaaactttcgagggaataattagaagagctttagaaggcaaaacaaaaagcagtaaacaaaaggttcactgcccattaaaatgctactgagcttgccgcatcgtcattgaatgtcaattcaacagtctcagtcagaatatcagcataactgtatgaaactctttcaaacgaattctcgtcttgatctagttgtatcacaaaaacagaagggtacgtctcagctaaaatgcccgaacgctcaatcgtttttcggcggccgccgtttgcttttaacgtaagccgtttacctaaattcccatcaagcgatctttttatatcggacaacgtcttcgccattgcatccacctcactacatttattgtacaacaagagcccaattttgtcaaataaaatttaaattatatcaacgttaataagtcattgtcaacaaaattattttgacaaaattctattgatttctgcgttatttttcacaagttccggaaatttatgtatcaatttgtaaaataattaacccgcatagcgaaatatatgcgggttttatcactcatccatttgatttatacggcataccgacacgcagcacacccttcgtttcaattcctcccagccctttctctctcgtcagcgtatttctcaggacatcccacacattgatccgctccataaacggagtgaagctgattttcgcgacaatatataccgggtcaagcgcatgaatattgacgcgtgacggcgaacttgcgaaattcgcgcccgctctgattaaagactcgaaatgagattggcaggcccccgcgaatatgaccagctgatccaaatgagggactttacgcctcgctctttgaacggtttcgacaaagtgtttggaatgcctgtaggcgcttaaatcgttcacgcctcccttatgcttggaatatgcatcatggccggtgatgactaaaatatccggcctgtatttatcaagcagctcgtcaattgatgccggcatttttttctcatggcaatgaattccgtataccggcacaccgattttttcataaaagttcaggcactttttcaaataggcctcatcgccgtccagatgcaatacctttccgggcatatgaaagtagtgctcctgatgctgatattgatttgtcgcataatattcctgtttttcccgaagcagcttataatcctggcggagcagctcgagagattcattcatcctgctttcatctcttttctttctcatggcctgttcgtcttttctgacaggctccaaatcagaaaaatcagcatccgcaatcaatctgacttcgtcaccatgcaggatggcaattgaatttccgttgcttgtttgctctataccgataatgcgaaataaaacatccatttgataggatttcctggctaccatatctcctatttgaaattgcacgttacccactccacaaatagactaagcctcatcatgaaagaagtcttggcaaatacacctctttccgctgcggcgcttgatgtttcaagcttttcttgcagttgaatgaataaggttctcctctagcctatgtagcggcagtccaagtggtgacgcaaaacaaaaagccctcttagaaaagggctttatgcaatccgttggacaggagcgcgaattcttctatggacagggattcaccgcgccgctttccgtcaatattcgtttcttgaagaacttcttcaatttgagcttttttctcttttccgcccggaagattgttcacaaggttgttaagcaaggttttccggcgctgtgcgaagcttgctttaatcagctggaagaaaaacggttcattatcgacgtcaaccgccgggccgtcacgaagcaagagacggatgacggcagaatcaacattaggctgaggcacaaacaccgttttcgggacggtcatgacggttttggcctccgtatagaattgaaccgcaatggaaagcgatccgtactccttagaagaaggatcagcggccatccgctcagcgacctctttttgcagcatcacgacaatcccttttaacggaagatgttcttccaagagcttcatgatgatcggcgtcgtcacataatatgggagattcgccgtcaccataatttcatcacaatcctgaaaatgctcttcaatgacggatttgacgtctgctttcagcacatcttgatgaatgatcgttacattgtcatatggagacagcgtatcattgagaatgggcaggaggcgctgatcaatttcaaacgcgacgacctttttcgcccgtttggcaagctgctctgtcagcgcgccgattccgggcccgatttcaatgactccggtccgatccgtaatttccgcatggtccacaattctgtccaatatatttgtatcaattaagaaattctgtcccagactctttttaaaagagaaaccgtactttttcagaatttccttcgttctgataggtgtcgcgatatctttattgttcatcctgttcctcctgcctcatagcatcgagcgcatcaataaaatcacttcttttgatttgaaacatttgcagccgtttttgaagctgcttgccgtttgtatagccgatcttcagcaggtcgcccaatcgttcgcggcgtcttttggcagccggtccgccgatcagaccggcctgtatgacatcttcagctgaaatctcactcggctttgcctccatctcttcatgcacattttccagacatgctctgatgctttcaatggatgcgtgctcaacgccaatgccgcgcttgtttttcggtttggcaagatgtttgggcagaaatgcgtgtttacagccgggtactgcttcagaaatggttttccggatcttttcccccggaaaatccgggtccgtcagcacgatgacccctctcgtttcctgcgccagccgaatctgtctgatgacttcgtctccgattgcggaaccgtttgtctcgatcgtatccgcatcaacggcaagttttatgcgcgcagtgtcatcgcgtccctcgactacaataatttctttaattttcattacttcctccaaaaaaactttttatatccaaaacgaaacctttgcttacatgtcacgtctaatatactgaaaatacactttacctattataacgaaaaaaacagagggcgcaaaaccctctgagtgaatcggaattaatttaagatttttattttgacctgtttctttccccagcggtaagccgaagatttttcagggaaaaagacatcaatccgtcttcctttaatggctgagcctgtatcagcggccacggcatccccgtatccgtctacgtggactcttgtgccgagcggaatgacgcttgggtctaccgcaatgactttagcattcggattgcttgtcaggttaacgcctgtagccgtatggccggaacagccgctgcagcttgcggtataagccgtggaagacacggtaatcactttaccggaagatccggtttcgccagaagatgccttcacaggtgcactgagctgctcaatcttgggactgtgccgctttgtgccgaccgcaatgatttgatctttgcttttttcagatgtttcttctttaacaagctttcttgaaacttcttttccattttctttgacaacatgaaaatgctttttaagtttgccttcttttcctttttgaacgatcttttctttcccgctgtcgagagacgcatcttctttttctttcacttgatacgctattttttcctcaactacatcggtgactttttcgatacgagtgatttgtatgccggcctgattttttgtgagcttttcgtgtaatgccggttttactttatcttcgtctttcatgtccatcttatgctgcgttaaaaagtcagcgaccgtagtcgaagtcgtccatattttctttttctttcccgcatcatttacagtgacctgaaaagccgggtcgaccgtgactttcatgccgtttgtcactttcgtatctgctgctggatctattttatcgtgctgattcacaggtgtatgctgttcgttcagaaatgcgccgactgtttttgccgttgaccataaagtcttttcttctccgcctcttgtcacacggatctgctttgcagcttcatacacgacattcatgttgtctgccaatgctgtctgcttagacggggtaatccggtcttcatttctcgtctctatatgtaaatcttccagaagttccccaaccgtttttgcatgagtgcgtatttgctttttcttgccgttgatagaaacagaaactgattgttttgagagctcatgtgccccgtatgcagtcccggttccgcccagcagaataatagctgcaataagaataaccttgcttttaccaagctttacggaaaacagttttttcattttttgtgtgatgaaaaacgcctccttctcctcggagagattatatagagtatctaaaatgctgtcaaccctcccatctcgaagatgaaaaaccttcagcgtatccctcattatgcaaaaacaaagcaaaaaaaggaagagagacatatcgacaacctatcttatgaggagaaggaagcttgtagaaccgttttacatatccactgaatcggacaagcctttacacgttacgacagcgcattctgtcagttcatgcggaaaagtctttttgcgttttcggttgtaattgaggcaatttcttcatatgtcagcccttttaattcagcgagctgttcagcaacatattttacgtagcttggctcatttcgtttaccgcggaaaggatgcggtgtcaggaaaggacagtccgtttcaatcagcaaacggtcattcggaatttcctttgctacttcttttggtttcttcgcatttttgaaggtaaccggtccgccgaatgaaatataaaaattcatatcgatacactgccgcgcaacctccgcgctccctgtaaagcagtgcataataccgccgacttcttccgccccctcttctttcaaaatcgtgacaacatcttccgttgcatcacgattatgaatgataattggaaggttcacttctttggcgagagcgatttgtttccggaatacttctttctgaatgtcttttggtgatttatcccagtggtaatcaaggcccatctctccgattgccacaactttttcgtgagaggacagttccttaatccatgataaatcttcctctgtcatgtcaattgcgtctaccggatgccagccgatcgcagcgtatataaagtcatattcctcaatcagctccatcgcacgcgtgatagtgggtttgtcgaatccgacaacgacgatccgttcaactttttcagcctttgcacgcgcaatgacttcctctaagtctgtgtcaaattgctcggcatttaagtgcgcatgtgtatcaaaaagcatcataaaaactcctttcttgttgaaaaacaaaaggtgttcgacggaatgttacacgtgaaacaccttttgcatctattatttaattcgagtgcctttcggtaatgactggtcgacagctacaactttgagaacgccgtccgattctcctgccagtatcattccttgagaaagctcgcctctcagttttaccggttttagattcgttacacaaatgatcttcattcccacaagctgatccggtgtgtaatgcttcgcgatacctgatacaacttggcgctgttcaaagcccagatcaatttgcaatttcagcagccgatctgcttttttcaccggctctgcggacaagacttctgcgacgcgaagttctgtatccataaattgatcaaacgtaatttcaggaagacgttctgcttcttgcggctcttccgccttttcttctttagcaggagcagttccttgcattttttgcttgatgtaagctacttcttcttcagcttcaagacgagggaaaagcggttccccttttttcactttcgcgttcttcaattggccgaatgtctgaatgctgtcccatgctttaagagactgatcctcaactccgagctgggcaaacattttttcaggcgtttgtgtcaagaaaggctggagcaatacggctgagatacgtaaagattcagctaaatgatacatgacggaacataattctttttctttttcctggtctttagcaagcacccacggagcagtttcatcaatatatttgttcgtacggctgattaattgccatagcgttgataaagcgactgaaaactccatgttttccattgccttttcataagctttaaccgtttcaccggctacagaagaaagctctgaatcaaaatcggtcacatttccttcatatgaaccaatctcaccgtcaaaatatttttggatcatcgcgactgtacgattcagaaggtttcctaagtcgttcgccaagtcataattaatccgttctacgaaaccttccggcgtaaagacaccgtctgaaccgaacggtacttcgcgaagcaggtaatagcgaagctcatccaagccgtagcgttcaattaacgttaccggatcaacgacatttccttttgatttcgacatttttccgtctttcatcaataaccagccatgcgcgaatacttgcttaggcagcgggagatcaagcgccatcagcataatcggccagtaaatggtatgaaaacggacaatttctttaccgacaaggtggacgtcagccggccagtactttttgtaaagctcatcattttccgtatcgtaaccgagcgctgtaatatagttgaacagtgcgtcaatccatacatacacgacatgcttcggatttcccggcacttttacgccccagtcgaacgtcgttctggaaacggccaagtcttcaagccccggtttaatgaagttgttaatcatttcatttttgcgtgattcaggctggatgaaagaaggattttcctcataaaacttcagcaggcggtctgcgtatttgctcatgcggaagaagtatgactcctctttgattaattcgaccggatggccgctgtccgggctttttccgccgacaacctcacccttctcatttcgttccacatccaccagctgtgtttccgtatagaatgtttcatcagggatgctgtaccagccctcatactcatccaggtaaatgtcaccattatcaagaagtttttgaaacactttctcgataatttctttgtgccggctttccgtcgtccggatgaaatcatcgtgagaaatgtcgagctgcttccatagtttttggatttcagcaactgcacgatccacataagcttgaggcgtgatattctcttcctccgctttctgctggattttctgtccgtgctcatccgttccggttaagtagcgtacgtcaaatccttttaatcttttgtaacgcgccatcgcatcgccggccacggtagtataagcatggccgatatgtaattttccgctcggataatatatcggggttgtaatataaaaagtattattgtcttgcggcatgttgcaacctcccattcagaatgtcgaaaagctcacgcccaaaggacgagagcggttttatttgatatacaatattgatatttgtcctctatctatgataccatcttagcctttaagatcaaggatatatacgtactgcgcgtaaaagagtaaataaaattaaaaatttttattgaaattaaaaaaagtcttaacatgtcgaaatttgtcgtatataatctactaatataaaacatcttggttcgaaagtcttgatttaaaaggattttcagtaggataataggttcgaaaaagcagtcaaaaagcctgttatttcaggatttccaaggctttacttactataagaactaattcttacaatcaatagtaaacaaaaagattgacgattattggaaaccttgttatgctaggaatgtaaggaattttgtcgaataatgacgaagaaaaatataaactacaaaataattatctctcgggaggagactgttaatgaaatctactggtatcgtacgtaaagttgatgaacttggacgcgtcgttatccctatcgaacttcgccgtacactgggcatcgcagaaaaagacgctcttgaaatttatgttgatgatgaaaaaatcatccttaaaaaatataaaccaaacatgacttgccaagtaactggtgaagtttctgatgataaccttaaacttgccggcggcaaattggtactcagcaaagaaggcgctgagcaaatcatctctgaaattcaaaaccagcttcaaaaccaaaaataagctatttcatacaaaaaccgttcttgttacgatacaagaacggttttttttatgattgaatgtgataagcgtcataaatctctcgtttcggtacgccccgatctaccgctgtttgttttatggcctgtttggaagatgctccttcgtttatgtaatgctccacatgctctttctcagaaagctccgtccaccaaggcttttcctcttcatccggttcagcggtttgatttccttcgacaacgagacagaactcaccgcggatttgatcttcatttgcccattccatcacctcggcgatggttcctctgatgaattcctcgtactttttcgttaattctctcgtgacggcgatggttcgattacccaaaacgtcatgcattgctattaatgtttcttttaatctgtgcggcgcttcgtaaaatatcatcgtttcctgccgttttttcaggatttcgagttctttcttcttttcttttttctgtctgtttaaaaatccgtagaagaaaaacggctgcggggtgatgcctgatgcggtcagcgcggttaatgccgcattagcacccgggagcggaacgacatatccgccgatttgggtgaaatctctcacaatctcagcccccgggtcggaaattgtcggcatgccggcatcactgaccaatgccacattctttccgcttttcagccattcaatgattttatggccgctgctttctttattatgttcatgatagctgatgagagatgtttctatgtcataaacatggcacagctttttcgtctgtctcgtatcttcggcagctatgacatcggccgatttcagcgtctctactgcacgaaaggtcatgtcctccaaattgccgatcggtgtaggaacaaggtacagagttcccatttcagattttccgttaaaactcatctggcgtcttaacatatacagcctccttgctgcgtcgtttttcttctatatattgctcttttttctttcgggtcagctgcttaaaacggtattccgcctgcatcgcttcccgttttgtttcaaatgattccgcatggcataacgaaaccggcctacgcgcccttgtgtacttcgcgccctttccctcattgtgggttttcagccgtttttgcagatcatttgtataaccggcatacagactgttgtcattgcacagcagcacataaaagaaatgactatttgtctccatataaaatcgtgcggatctctttcgtatattcattttgttcattgtatacgaacagcgggggaagaattttgagatcagggcggccgcctttaattccttcaaccaaaatggtattcgcttctttaccttgtttcggataaataaactgaacccgtttcggttctattcggtacgctttcattaattcaaagatttccaaaagcctccccggccgatgaacgagagccgcttttccgccttgcttcagcagtttgctgctgacggaaatcacatcttcaagcgtgcaaagaatttcgtgccttgcgattctgagatgctcgttcaggttctgctccgcctctttcggtgttttaaaataaggcggattgcaggtgacaatatcatatttattatgtccgagtctttccggcatatttttcagatcatcatgaatgagactgatctgaccgcccagcccgttgtattccacgcttcggagcgccatatcatacaagcgttcctgaatttcaaccccggtgatatcagcttttgaccttgtgctgagcaaaagcggcacaatgccgttccccgtgcataaatcaacgatgttccccttttgaatcggaacgtatgcaaacttagacagcagcacggcatctaatgaaaaagcgaaaaccgtcggactctgtactattttcatatcctctgctaataagtaatccaatctttcatcatcacgtaatgaaaccataatcttattcctttcggcactctttgaaaaaggcttccgacatcagcggaagccttttccttattttttatttaagaaggacagacaaaaaaggcaatctcccttgcggacgctcccataatggacgttgcaaatatgaaagccttcttgatacagccgggccagattgtcgtacccttctcctatatcactctgctctgccttctgtgtttttgtttctttctgatcggctttgaatttctcaatttgctctgtcgtatcatcaagccgcttacgcaaatgcttattttcaagctgaagatggtgattctcttcaatcatttcgccgatatgctgctttaagtcacccagctgacggtacagcgaaccgatttgttcctccaggtttatgacagtatcaaataactcttttttatccaaggttccacacctcgttaatctgtggtttgtgcggatacgacgccctcttccaagagctcttcccaagtatattctatcactttttcacgattcttcagttccacctgaagcacccgttccagaatattaagaccgacaacctttgcggggccgtttgccgtcgtaatcatttcgcctaaatccggcagctgttcttttgccgtctcatactcatcattttcgtacttcaaacagcacatcaaacggccgcacagaccggaaatcttcgttgggttcaacgataaattttgatccttcgccattttgatggacaccggttcaaaatcaccgaggaacgtggagcagcaaagcattctcccgcatggtccgataccgccgagcattttcgcctcgtccctcaccccgatttggcgcaattcgattctcgttttaaagatagaagccaagtctttgaccaattccctgaaatcaacccgtccgtctgctgtaaagtaaaaaatgactttattgcggtcaaatgtaaactcaacatcaaccagcttcatatctaagccgtggtcagccacttttttctgacagacttcaaaagcggacagggcctcctgtttgttttcttctacaatgagaagatcgcgttcatcagcaacgcgtatgacctttcgaagcggaagcacaacatcatgctcgtccacttgtttatttgcgatgacaacctgcccgtattcgacacctcttacggtttcaacaatgacgcagctgtcttgttctatatcaaatccgttcggatcaaaataataaattttccccgcttttttaaagcggacgcctattacgttgtacaagcttatccctcctgcaacgttaacaccaagtgctccattaatccctgcacattcacattggaatgaagccgtttttttgcttctaaaacagcgagaatttggttcgtaacgctttgttgtataaattgcagcgcatgctgttttattgattggaataagtcttgataaatcagtttatcttcatttccaatttggatggataatacatcacggtatatcaataagagcatatcaagacccatttcttgatgggttttttctttgaaaaagggcacccactgatcctgaatgaagaaaaaggcatgtcctttccgctgatgtaagacttcatacaattttatcactttcgctctggactctgcaaactcatcatttcgacttaattcgactgcttccgcaatattatttgtcatatttgctaagagccgggccatgtgagggctcacttcctgttcaatcagtctttcttctatggctttcggctgaagcggctggaacgggagaacctgacatctcgaaacgatggtatccagtattcggtggagctgctcagtaataagaattgcgatggtgtcttgactcggctcctctaaaaatttcagcagactgtttgctgcatttgtcgtcatttgatccgcatgggatataatgtacagctttttatgcgattccagtcctgttttagaaaactcttcctgaagcgattggatctgagcctttttaatggataatccgtcgggctgaaccacatggaggtcgggatggtttccggattcaatacgcttacagttccggcactccccgcaaggctcagtcccgtcttcaaggcaaaaaaagctttttgcgagaagcagtgcggcatccaatttgcccgttccttttttgccttcaaacagatatgcgtgagaaagccttttcttttcaatgctgttatgcaaaagccgcatcactctgggctgctgcccggtcatttccttccatgatattgccattgtatcactctctatgtgtaaaggttaatcaataaaccttttatttctccgattcgatccagcaaatcaattgccggtttttcctgatctaacatttcttccgtcagctgaagcagtttttcatctatttctttcacaagccccagagtccggctgcttccgtacaggtcaaagcttttctccgtctcatgcgataacccgctgtctacggcctcttttacaaaacgttttaccaatcctttgaatttcgctaagtctttgaagtttctcgacttcgtcagccttttcccgaacgtttctatatccgttaagaacctgctcagctgatcaaatttcagcttgctgctttggctgtccattgaacttttaaatgttccggaaagctctgccgctttataagcaggctgctgctttttctcaataaatgtacgtaagtcagaatttattttcacgtcgtcaaatccttaaaattgatgaaattcatcgaccgggaggacaaagaccgtcgctccgccgacttccacttcgacgggatatggaacgtaggaatccgcattcccgcccatcggggataccggggcaatcatctgatcacgtttacagccattctctttaatgaggctgagcgctttatcgacacggatatcttccaccccgatcataaacgtcgtattgcctgatttaaggaatccgcctgttgtcgcaagcttcgtcaccctgaagttgtggtcggttaatactttcaaaagcctgttgctgtcctgatcctgcaccactgccactattagtttcattctctaggccccctttaggttggaaagaacattatcgttacattcattatagcaacttatgagaaacaggtcacaactgaatttttttcaatgcttcatttatcacttgaagtgcgtcctgaatgacgagttccttctttttcgatgcgtcgattgtatggaatctttccggaaaacgctgcattaccttttggtatccttcccgtactttcgtatgaaagtgcagggcctcaagatcgagacgattcttctctcttgaatcattcgacgtaatccgtttcaacccttcttccggctcaatagaaaaatagatggtgacatcaggcatcgtatcgccgattgcaaactggttgatagaaaggacttcatcaatgccgagccctctcgcatagccttggtaagccagcgaactgtcgatgaaacgatcgcacagcacaatgcggccttctttcaatgcaggctgcaccttttcgactaaatgctgtcttctcgccgcagcgtaaagcagcgcctccgttttggcatccatcagtgtattgtttttatttaagatcacttctctgatctgttccgcaatgtcgatgccgcccggttctcttgtcgctgtcaccgggagcccctctgccgacagaatctctttcatttcctgaagcacagtcgttttccctgcaccttcaggaccttcaaatgttataaataaaccgctcatgatttctcctcttctatatagacaagtaattgttccccgtttaacaagccttgaatatgcgcgtccatgccgattaaacgggaaagcttttgtacgatctcttctgttatccgttctccgtccatgatcagcggaattcccggcggataaggaataatgttgcccgcatgcaagcgcccggccgccttatttatatctgcaggctcttttgtaaacttccgcatctcattttgcgggtattcaagtgtcgatatggacggaaatgtccaattcacggcatccggcaatttatcgggcggtgtattctccagtttctgctgtatgtttcttacggttgcctgttctatcatccgccggccgcctatcggcagtacgagcaatacttggtactcgtcagccagctcggcaacaatgccttcactctccaaaatccgttgtaatgaatagccggaatgtccgagctttgaccgaagaattaattttaacgggtccgcccgcagcccatatccagaaggctcgattatttcaatagaagaaattgatgcgaaccttcgtttgattttctcaatgtgctccatatgaacgggaagtgtccctttttcagcaatatcctgcacataagcgcgcgccgtatctaaagatgccataatcgggtatgacgggctgctgctttgcaaactgcttacataataagttaatcgatctctgtcaattctggtgctgttcaaatgaaagtaagaccccatcgtcatagccggaagcgttttgtgagccgattgaacaacggcgtctgcccccatagccaatgatgaaggcgggaaaggctggcctaacacaaagtgagccccatgagcctcatccaccagtacaggaacgccgtatgaatgggctttgttaactgccgcagtcaaatcggcagcatgcccgtagtaagtcggattggtcagaacaagtcctttcgcgttcggatatgacgccagcgctttttcgatgactgaaagggatacatgtgccggcacatgcatgttttcatcgatttccggcgccaaataaaccggcttggctccggccaatgccgccgcatggaaaacagacttgtgacaattacgctggatcagaatgggttcacccggttcacaaacagctaaaatcatcgccagattgccggcggtcgttccattgacgagaaagaaactttcctgagagccgtaaaatctgctcaccaaatcctgcgcttccttaatgacccccgtcgggtgatgcaagtcatcaagacccgtgatctcagtcatatcaatagataaaagagattgatatacagatttggcttcatcaaaaaagacatctccattgtgatgtcccggaacatgaaaagaatacgtatttcggtgcgcatgcttcatcagcgctgtatataaaggtgtgtccatttttaaacaaatccttttcctgtctttcttattatatcgtgcctgcgagccaacttaaagctaagactttttgccatctagccgttatcccggccggacctcatatcaagcagcttcttttttaaatcgccttccatgataacaagctcctcctcggcacgcctgcgtttcatcctgccttcttcttgaatagacatgatttcttcaagtgtgctgactaagctttcctgcagttttttgagggtttctgcctcaacaagtccgcgctcattggctttcgcggtctcgactgtacttgttttcagaagttcagcgtttttcagcagcaattgatttgtcgtatccgccgccttctgctgcacatctgccgcactccgctgcctcataagcgtcagcgcgatggcgacttgattcttccataaaggaatagccgtaacaatggaggactgaattttctctgccagtgcctgattcgtgttttgaatcaggcggatttgcggcgcactctgaagcgtaatctgcctgctcagcagcagatcatgcaccctcttatccagacggtcggcaaactggcgaagatcattcacttcctgcgcggccatttgattgtgtttttgtaattcggcttttcttgccgcttcaggtatcagctttgttttcagctcatctgattttaattcccccgctgctatatacatagttaaatcagaaaagtattgtttattttgggcgtacagctgatctaacaatttattgtcactcaacagcacatttttagaatgttccagccttctgctgatacggtcaatctgcacacttgtcttttgatatttcgaaagcacttcctgcacggaaccggacacccttttaaacagcctggcgaaaaaccctttgttcttcatctgcagatcatcggggtttacctggtcaagcttaatcatcagatcagccaatatttgtcccatctctcctgcatcttttctttgcacgtgctctatcatcgtatgggaaaattccagaagattcgcctgcgcctgtgaaccaaacagaacaatgctttgcatgttcccagggtccagtttttcagcgagctgaagtgccgcttctcttttttcttccggcagcgtatctgcaagctttagaggagtctggtcattttgggcgcccatgctgtcgtcggaacggtctttggccatttccttcttcctttcttattttctcagtgaatgctttgccatatctaattcaaagtgcaggtcgtcgatgtcctccttcatcagttcatgaagatcctcttccagccttctggaaagccctgccagagtcatcctcgtctcactcaaggacattgataaatctttattttttcgcggctgtgaggagagcagagcatacttttccgtcagttccacaacagaatcaagcgtttgataatagaaacgctctgcctgataaaaacgcttcggctcctgctttgtgagcagatatattcgtcgggttatccgcagtatctctgcattctgcttcagcatttgtatacttttagagcgaaaaagcgccctgcgtaatcggatgattttaccctttgcttcctcaagattttccttgatataagcatattcttttcttgtcagccggtgtttttttaaaaagagacgcttcgcattccacaggccggccgcactgacagcggctccgccggctgccccgtataaaagcgaatacagaaaaggctgatgccctatcgtaaagaaggttatccccgctaatacaaaaactgtgctgccgcaaagcgtccatttcatatattgaataaacggtttcatacttgatcgactcctatttattcacttttatcagtattatctattacattccatgtctaaacaagttcctcttcttatcgtatcagttcttttataaaaagtgtaaaaactcctctgatttcaggcaaaaaaaaaacccttttcagggttaagaatataacgtcggtgtatgaaggcttttcagtttacgaacgaaaaattcataattcggatcagaggtcggagtggaaactactttcttctcacactctaaacatataaatttcgtataaatatggattcccctgctttttttggtttcacacacaatacatgtttcttcatggctggacgtttcattcattttgcccacctccgtatgaatagccttcccttaagctgttgattgtatacacaatttggacctttttgaagtttgcaattagtatatgggcgtttccgtatttcggtgtttgttttgtttttattcaaaaacaaaaaaggcagctcatgatgagctgcctttatcataatatagcttggcggcgtcctactctcacagggggaaacccccgactaccatcggcgctgaagagcttaacttccgtgttcggcatgggaacgggtgtgacctcttcgctatcgccaccaaaccattgagagtgttctctcaaaactagataacagtaagcatacattcaaattggttaagtcctcgatcgattagtatctgtcagctccatgtgtcgccacacttccacctcagacctatcaacctgatcatctttcagggatcttacttccttgcggaatgggaaatctcatcttgaggggggcttcatgcttagatgctttcagcacttatcccgtccgcacatagctacccagcgatgcccttggcagaacaactggtacaccagcggtgcgtccatcccggtcctctcgtactaaggacagctcctctcaaatttcctgcgcccgcgacggatagggaccgaactgtctcacgacgttctgaacccagctcgcgtaccgctttaatgggcgaacagcccaacccttgggaccgactacagccccaggatgcgatgagccgacatcgaggtgccaaacctccccgtcgatgtggactcttgggggagataagcctgttatccccggggtagcttttatccgttgagcgatggcccttccatgcggaaccaccggatcactaagcccgactttcgtccctgctcgacttgtaggtctcgcagtcaagctcccttgtgcctttacactctgcgaatgatttccaaccattctgagggaacctttgggcgcctccgttaccttttaggaggcgaccgccccagtcaaactgcccacctgacactgtctccccgcccgataagggcggcgggttagaaggtcaatacagccagggtagtatcccaccgatgcctccaccgaagctggcgctccggtttccaaggctcctacctatcctgtacaagctgtaccaacattcaatatcaggctgcagtaaagctccacggggtctttccgtcctgtcgcgggtaacctgcatcttcacaggtactataatttcaccgagtctctcgttgagacagtgcccagatcgttgcgcctttcgtgcgggtcggaacttacccgacaaggaatttcgctaccttaggaccgttatagttacggccgccgtttactggggcttcaattcgcaccttcgcttacgctaagcgctcctcttaaccttccagcaccgggcaggcgtcagcccctatacttcgccttacggcttcgcagagacctgtgtttttgctaaacagtcgcctgggcctattcactgcggctctctcgggcttgcaccctaacagagcaccccttctcccgaagttacggggtcattttgccgagttccttaacgagagttctctcgatcaccttaggattctctcctcgcctacctgtgtcggtttgcggtacgggcacctctcacctcgctagaggcttttcttggcagtgtggaatcaggaacttcgctactataattcgctcgccatcacagctcagccttcacgggaaacggatttgcctatttcccagcctaactgcttggacgcggatatccaataccgcgcttaccctatcctcctgcgtccccccattgctcaaatggtgaggaggtggtacaggaatatcaacctgttgtccatcgcctacgcctttcggcctcggcttaggtcccgactaaccctgagcggacgagccttcctcaggaaaccttaggcattcggtggaggggattctcacccctctttcgctactcataccggcattctcacttctaagcgctccacaagtccttccggtcttgcttcacagcccttagaacgctctcctaccactgttcgaagaacagtccgcagcttcggtgatacgtttagccccggtacattttcggcgcagagtcactcgaccagtgagctattacgcactctttaaatggtggctgcttctaagccaacatcctggttgtctaagcaactccacatccttttccacttaacgtatactttgggaccttagctggcggtctgggctgtttccctttcgactacggatcttatcactcgcagtctgactcccaaggataagtcatcggcattcggagtttgactgaattcggtaacccggtaggggcccctagtccaatcagtgctctacctccgagactcttaccttgaggctagccctaaagctatttcggagagaaccagctatctccaggttcgattggcatttcacccctacccacacctcatccccgcacttttcaacgtgcgtgggttcgggcctccattcagtgttacctgaacttcaccctggacatgggtagatcacctggtttcgggtctacgaccacgtactcaattcgccctattcagactcgctttcgctgcggctccgcatcttctgcttaaccttgcacgggatcgtaactcgccggttcattctacaaaaggcacgccatcacccgttaacgggctctgactacttgtaggcacacggtttcaggatctctttcactccccttccggggtgcttttcacctttccctcacggtactggttcactatcggtcactagggagtatttagccttgggagatggtcctcccggattccgacggaatttcacgtgttccgccgtactcaggatccactcaggagagaacgaagttttgactacagggctgttacctcctatggcgggcctttccagacctcttcatctacctcgttcctttgtaactccgtacagagtgtcctacaaccccaagaggcaagcctcttggtttgggctggtcccgtttcgctcgccgctactcagggaatcgcatttgctttctcttcctccgggtacttagatgtttcagttccccgggtctgccttctcatatcctatgtattcagatatggataccactccattacgagtggtgggtttccccattcggaaatctccggatcaaagcttgcttacagctccccgaagcatatcggtgttcgtcccgtccttcatcggctcctagtgccaaggcatccaccgtgcgccctttctaacttaaccgttaaaaagaatcactacgtgatatcttgcattactaattgaatgtgaattacttctgttatctagttttcaaagaacacgttggtggagcctagcgggatcgaaccgctgacctcctgcgtgcaaagcaggcgctctcccagctgagctaaggccccgtattgggtaaagatggtgggcctgagtggactcgaaccaccgacctcacgcttatcaggcgtgcgctctaaccagctgagctacaggcccatctaccatatgaaagaatcaaagttccttcaaaactaaacaagacagggaacgttctgtttataagacccaaggtcttatattccgttaaaatccttagaaaggaggtgatccagccgcaccttccgatacggctaccttgttacgacttcaccccaatcatctgtcccaccttcggcggctggctccataaaggttacctcaccgacttcgggtgttacaaactctcgtggtgtgacgggcggtgtgtacaaggcccgggaacgtattcaccgcggcatgctgatccgcgattactagcgattccagcttcacgcagtcgagttgcagactgcgatccgaactgagaacagatttgtgggattggcttaacctcgcggtttcgctgccctttgttctgtccattgtagcacgtgtgtagcccaggtcataaggggcatgatgatttgacgtcatccccaccttcctccggtttgtcaccggcagtcaccttagagtgcccaactgaatgctggcaactaagatcaagggttgcgctcgttgcgggacttaacccaacatctcacgacacgagctgacgacaaccatgcaccacctgtcactctgcccccgaaggggacgtcctatctctaggattgtcagaggatgtcaagacctggtaaggttcttcgcgttgcttcgaattaaaccacatgctccaccgcttgtgcgggcccccgtcaattcctttgagtttcagtcttgcgaccgtactccccaggcggagtgcttaatgcgttagctgcagcactaaggggcggaaaccccctaacacttagcactcatcgtttacggcgtggactaccagggtatctaatcctgttcgctccccacgctttcgctcctcagcgtcagttacagaccagagagtcgccttcgccactggtgttcctccacatctctacgcatttcaccgctacacgtggaattccactctcctcttctgcactcaagttccccagtttccaatgaccctccccggttgagccgggggctttcacatcagacttaagaaaccgcctgcgagccctttacgcccaataattccggacaacgcttgccacctacgtattaccgcggctgctggcacgtagttagccgtggctttctggttaggtaccgtcaaggtgccgccctatttgaacggcacttgttcttccctaacaacagagctttacgatccgaaaaccttcatcactcacgcggcgttgctccgtcagactttcgtccattgcggaagattccctactgctgcctcccgtaggagtctgggccgtgtctcagtcccagtgtggccgatcaccctctcaggtcggctacgcatcgtcgccttggtgagccgttacctcaccaactagctaatgcgccgcgggtccatctgtaagtggtagccgaagccaccttttatgtctgaaccatgcggttcagacaaccatccggtattagccccggtttcccggagttatcccagtcttacaggcaggttacccacgtgttactcacccgtccgccgctaacatcagggagcaagctcccatctgtccgctcgacttgcatgtattaggcacgccgccagcgttcgtcctgagccaggatcaaactctccgataaagtagtttgactgactacgcacatcgctgtgcgatttatttaaaactttgaattaacaggtacgttttgtcttgtttagttttcaaagaacttcgtccatcgctcttgaagcgacttaattattgtaacatatcagtgtcgatgtcgtcaataactttttataatttcttttttaagaattcgtttcgtcatcagcgacgtatataagaataccacccttgatccaacatgtcaacaataatcgataaattaaatgatgaagcgtttaatgactatcaaagccgcgatgccgggaatccccagaatcccgctgatgcccgttgtaatcaggttaacagggatatgaataccgagactgcctccgaacaagttcacacccaccagcagaatcgcaccggcaataaacttaatcgcagtcacaccaatccatcttagcggttttgaagatactccccataaaaaaagcaaagcaaccagaccgacaatcaaaccgataatgaaaaaaggctccatgaatcttccccctcgcttgtttagtacaagcttatgagaagatcccggagaatagacctcttacttccatctgctcattttcaaattccgctgcttcgcttctttcaaataaaaaaagtacttagattcagcgactttcagctcaaacaatacctcagcggagggctcgagacttttctcgaccagactcttctgtctgttccattcttctttttgtttaaagagctgttctatcagcttctcatcaaactcttttcttaatgtatttctgcgaagaaaacccatgccttgccttttcctcccttacaattcacgtcttccttcaagagcttttgaaagagtgacctcatcagcatattccaaatcaccgccgacgggcagaccgtgggcaatacgggagagcttgatgcctgagggctttaacagccttgatatatacatcgctgttgcttccccttcaatattagggttggttgcgagaataacttctgtcacttgatcatcctgaagacgtttcagcagctccggaatcttaatatcctccgggccgatgccatccattggtgaaatcgcgccgtgaagaacatgatactggccgttatattccttcattttctccattgcgatcacatccttagggtcctgcacgacacaaataacagacttatcccttcttgtgtcctcacatatataacaagggtcttgatctgttatatgtccgcaaatcgagcaatatgtcagattccgcttcgcattgacaagcgccttagcaaaatccaatactgtgtcttctttcatacctagaacaaaaaaagccagacgaaccgctgttttcggtccgatccctggcaatttcataaagctgtcaatcagctttgatattggttcaggatactgcatgtttatttatccccctagaacaaacccggtatgttcattccttttgtaaattgtcccattgtttcattcgtcatgtcatccacttttttgagggcgtcgtttgtcgcagcaagaaccaggtcctgaagcatttcgatatcttccggatcaacgacttcttctttaatggcaatgtctacaacttctttttggccgttgacttttacagtcaccataccgccgcccgctgtgccttcaagcactttttcagcaagctcctcctgagccttcgccatatccttttgcattttttgcatttgtttcatcattttttgcatgtttcccattccgccacgcatattcaatcactctctttcatcttattagtcttttatttcgattaaatccgctccgacaagttttttcgcctctgcaatcagcggatcttcttcagccggttcgtttgatccttcactttcctgctggtgatcatttaaaaattcttctcttattttaccccattgtgcttccggaacgccaatcaaatccattcttttcccgagcattgattcgagaatctgttcaagattcgtacggactccgttattgtcttctgcaaccattttacaatggatttcgtatttaaatttaagtacaaatgccttttgagcagcagccaccggttcactgtcattcaacagagccgcatgagacaccttattctgctgtttcaggtgtgccagcagcttgccccagctgcttttaagctgttcaagttcaggtcttgtggcttccttcaatatctcatgaattcttccgaccggagctttgtaatggctttttccgcctttttgaggacgcggagcttctttcggagcgctttccatctgaaccttcacaccggaggttttcagcctttctacttcctgctcaagctgctgaatcttattcatcagcatgccgacctcaggggtgtctccggcggattgctgtgccgtctggcatattttcacgacagccacttcaaaaaagattcttgggtggttcgtccacttcatttcctgatggcttttattcaggatatcaatcatctcatataaagcgggggccggtatgtcaccgctcagattccgaaacgtttcatcgaccttcaccttctccaggactccttctaaaccgggagcggcctggtacaagagcatatccctaaaatagaaaatcatatcttcaatcagtttggccgcatctttcccttgctggagcaattcattcagtgtttccaatgcctcggaaacctgtttgcggtgaagagcagatgccagttttccaatatagtgctgagaaacggctccggtaatgagcaatgcatcatccaccgacagctcctcgccgctgaatgatacggcttgatcgagcaggctcagcgcgtccctcattcctccgtccgcagcactcgctatgatatcaagggctccttcttccaccttcagctgctctgcatcgacgattgtcttcattcgtccgacaattgctttggatgtaatccgtttgaagtcaaaacgctgacatctggagataatggttaaaggaatcttatgaggctcagtcgtagctaatatgaaaatgcaatgtgccggcggttcttccagcgttttcagaagcgcattgaatgcgccgatagagagcatatgcacctcatctataatatatactttgtaggtgacggccgacggggcgaattttactttgtcacggatgtcgcggatttcgtctacgccgttattcgacgccgcatctatttcaatcacatctgatatagagccgtttgtgatccccttgcacgccgcacattcattgcacggttcttctacgggggcgtgctcacagttgactgctttcgcaaatattttagctgcactggtttttcccgttccccgcggtccagaaaacagatatgcatgagaaaatttcttttgcaaaagggcattttgcagcgttttcgtaatgtgttcctgtccgaccacatcttcaaactgctgaggcctaaatactcgatataaagcttggtaacccacaggatgcgccctcctctgttattcatcatgtttattatacatgaacgtgcttttaacgccaaaacccgtttttcatatacgaaaaaactcacctgccataaacaggtgagtctgaaatttgatgattgatttaccgtgcaccttctgtcgattcgctaccctaagcgttacttaagcagttagctcagcccaggcaaccctgcggcacatgagaggtttcacttaatgctgcttccttccggacctgacatggttcatgaattcccattgcgcaggacccagacgtcaacgccacttacttaaggcagaccttacagtaaacgaacctcgagaagggattcggccccgctagagcggattgcgggtacagggcaccgctacctccccgcttagcacggcaaaataaatatcaaatttttatatgcgcaccattcatgatgcacacataagtatatctgcttcaggcagaaaatgcaaccgtactactcagacaactttttcctcatgtctttcttttgccggcgcagctttctgaaaaaagcgctgagcatttctccgcactcttctccgagcacgccgctcaccacttccgcttggtggttgaaccgctcttcctgcaagaggttcatcagcgttcctgtacagccccccttgggatcaaatgcgccgaatacgaccttatcgactctcgaaagcacgacggctcccgcgcacatcggacacggctccaaagtgacataaagaacggcatcctcaagtctccatgtccccagcctacggcacgcttcgtctatcgccagcatttcggcgtgggcaagcgacctctgttcagtctcccgcagattatgcgcccgcgccacgatctcatcgtgcagaacaagaactgctccgatcggcacttcacctttcgcttcggctttcttcgcttcttttatggcttctctcatataatattcatcattcataggttcgagctctcttcttaagttttttcatgtctcataaaggttaaaataggaataccccagcagaaaggagttgccggtattgtctgaacctaacaacacagcccttctgattgtcgatatgatcaacaattttcaatttgatatgggcgaacgtcttgctgaaaaaaccaaacaaattgtcccccgtattttatcattaaagaagcatgcaaaacaaagcaactggccgattatttatattaatgatcattacgggctctggaaggctgatattgatgccatcagggaggaatgcagcaacgacagaagcgcccccattataaaagaaatttcgcctcagccggatgattattttctcattaaaccgaagcattccgctttttacgaaacagcgcttcacacccttctgaccgaattacaagtgaaccgattagtcatcacggggattgccgggaacatttgtgtgctgttcacggccaacgacgcctatatgagagaatacagcattgccattccgaaagactgcaccgcttccaataacgacgaagacaatgatttcgctttgaccatgatggagaatgttctcttcgcagaaataaccacggaaaaacaaattaccgccgaaaaataaacatgatcagcctccttttttcatatatttgatagcggatatgaaaggaggcgtttttcattcagatctatatagtgaaacggggcgacacgctttccgctattgcggcgcgctaccggactgccgcaaatgtcattgcggaagcaaataaactgcctaatccaaatacattggttgtcggacaaacccttgtcatcccgattgagggtcaatattacgaagtgaaacaaggtgatactctcgcggcaatcgccggccgttttcatatatcggccgcggagcttgcgagggttaacggaattcagcccggcaccacattgagagccggaacccgcctttacattccgcagcaggcgaataagcccgatatcgaatcaaatgcatatatagaaccgcggggaacgagcgtaagcgctaatctccaacaggcggcaagggaggcctctccttatttaacatacctcggcgcattcagttttcaagtgcagcggaacgggactttaaaggaaccgcctttgaccaatttaaaaagcatcagtgacaggcacaacaccacactgatgatgatcatcaccaaccttgaaaatgacgcattcagcgatgaactcgggcggctcatcttgaatgacaatacagtgaaaacaaaactctttcaggaaatcgtctccacggctaaaaagtacggctttcgcgatattcactttgatttcgaatatttacgtccacaggacagagaagcctacaatcgttttttacgtgaagcgaggacgatttttcatcgggaaggctggaagatttcaacggcgcttgctccgaaaacgagcgcgacccaggccggcaaatggtacgaagcacatgactatagggcacatggagaaatcgtcgattttgtcgtaatcatgacatatgagtgggggtacagcggaggcccggctcaggccgtatcacctatcggccctgtaagaaatgtcattgagtacgcgctgacggaaatgccttcttcaaaaatcgttatgggccagaacatgtacggctacgattggacactgccttttaaacagggaacgacagccaaagccgtcagtcctcagcaggcaatcgctctggcagcacgccataaagtcgacattcaatatgacgaaaccgcccaggctccattctttcgttacacggatgaaaatcagagacggcatgaagtatggtttgaagacgcacgatccattcaagcgaaattcaatttaattaaagaacttcatttaagaggaatcagctattggaaactcggcctttctttcccgcaaaactggcttttgctcaacgatcaatttcatattgtaaaagagacgtttcgttaattggaagcgtcttttttcatgggcttttctgagagtgtgatacaatataaaggccggcagctgacggatgtttacagaattaaggaggattttcaatgaacagagccccttttatcgcggtagaaggtcctatcggggcaggaaaaacgacactcgctacgatgctttctgaagagctcggttttcctatgattaatgagattgtggaagacaacccttatctcgataagttttatgacaatatcgaggagtggagtttccagcttgaaatgttttttctatgtcacaggtataaacagcttgaagacaccgatcgagattatttaaaacaaggacagcccgttttgtccgattatcatatttataaaaatgttattttcgcagagcgtacattgcacggccaaaagcttgagaagtataagcagatttatcatctgctcactcacgacctgccgaaaccgaatatcattgtatacataaaggcaagcctgccgacattgcttcaacgcattgaaaaacgcgggcgcccgtttgagaaaaatatcgagcatcaatatctggaacgtctcattgcagattacgacacagccatcagacagcttcaggaagaagatccggatatatctgtactgaccattgacggtgatactgaagactttgttttgaataagacagactatgaaagaattgcccgtcaggtaaaggagcttattaaatgaaagacattcatattccaaacaacgccattatcacagtagcgggaacggtaggagtcggaaaatcgactttgaccaaagctttagcaaaacggctcgggtttcatacctcacttgaggaagtggatgaaaacccttatttagagaagttttatcacgattttgaacgctggagcttccatttgcaaatttattttctggctgagcggttcaaagagcagaaaaacatgtttgaatcaggcggcggattcgtgcaggaccgttcgatttatgaagatacaggcatattcgcaaaaatgcatgccgataaaggaaccatgtcgctgacagattacacaacatacacaagtctatttgaggcgatggtcatgacgccgtacttcccgcatcctgatgttttgatctatttagaaggcgaccttgaaaacattataaaccggattgaaaagcgaggccgcgagatggagctgcagacaaaccgctcctattgggaagagatgtatacacggtacgaagactggatcagcggttttaacgcctgccctgtgctaaaagtgcgcattgaagattatgaccttgaagctgatgaacagtcactggaacctttgatcgaaaaaatcagccgcgtgatcaacgaaaacagaaataaataaaaatagcaaagcgattttccccgaacagagaaaatcgctttttttgcatataaaaaatccgctgcatcacatgcagcggacaaaacaatctccaatatatgctcgagtttcattaggtttaaaatcaatatggcggaggaagagggattcgaacccccgcgggctttgacacccctgtcggttttcaagaccgatcccttcagccagacttgggtattcctccgtatcgacatttaataatataccacatgacctaaatttcagtcaagcgctttttcatattttttatttcatttcttaaacagcttgtccgtcagctttactatcatacaaaagtcttgcgtccaattcaacctcagtatgccatacgggcaggaaaacacagtaaaaatcaagaatagattcaaacagataacctgctcataaaggtggagaacataatgaaaatcattattgcaccggattctttcaaagaaagcatgacatcaaaagaagccgctgacagcatagaaaaaggattcaaagcggtcttccctgacgcggaatatatcaagatacctgcggccgacggcggagaaggaaccgttcaggctttgacggatgccactggcggaagcatcatcaaaaaaactgtgaccggtccgctgggaacgccggtaaacgccgcatatggacttctgggagacggacgcacggcagtcattgaaatggcggaagcatcgggacttcatctcgttccccgccatctcagagatccgttgaacacaacgacaagaggaacgggtgaactgatagcagatgcagcttcccgcggggcgggtgagatcatcatcgggcttggcgggagcgcaaccaatgacggcggaacaggaatggcgagcgcgctcggtgtgcgtttcttaaatgaggaaggtcaggagatacctgacggcggaggcgctctgcacaccctagcttctattgatataagcggtctctctcctgatctgaaacatatccgtatccgtgccgcatgtgatgtcgaaaatcctctgaccggtaaaaacggcgcgtcatatgtcttcggcccgcaaaaaggggcatccgagaagactaaagttgtattggatcgcaacttacgccatttcgctgacgtattgagacgtcagcacaatatcgaagcggataccgtaaaaggcgcgggcgccgcagggggactcggcgccggactgatcgctttcttacaggcagaacttcaaagcgggattgacgttgtattagatacactgtccttctcagatcagataagaggcgctgaccttgtcattaccggagaggggcagatagacggacaaacgctattcggcaaaacccccgccgggatcgccgcacgcgcatctgctcaagaaattcccgttatcgcattggcgggctccttaggcaaaaatttcgagcatgtttacagcgcaggaataacggctgtgttttctatcgtgcccggcgctgtaagtcttgaagacgccttagcatccggccgttttaaccttgaaagcactgcccggaatgccgccgctctataccgggcagcaaaaaaggcgcgcctctagggcgcaccttttacggtttgatgacttctttatttcccatataaggacgaagcactttcggaatgatgacacttccgtcttcctgctgatagttttctaagatggcagctactgttctgccgactgcaagacctgaaccgtttaatgtatgcacatgctccggcttgcctttcgcttcgcgtctgaatcgaatgtttgcgcgtctcgcctggaaggcctcaaagttactgcaagaagaaatttcacggtatgtgtcttggcttggaatccatacctcaatatcgtactttttcgcggctgtaaagccgagatcaccggtacacatgctcatgacacgatacggcagttcgagcagctgaagcacccgctcagcttgattcgtcagtttttcaagctcctcataagaatcttccggcttcacgaatttcacaagctcaaccttgttgaactgatgctggcggatcaaaccgcgtgtatcacggccggcagatcccgcttctgaacggaagcaagcgctgaatgcggcataattgatcggcaggttctcaccggataagatttcatcgcggtgcatatttgtaatcggcacttccgccgtcggaattaagaaataatcttcttctctgattttaaaagcatcctcttcaaatttaggaagctgtcccgtacctgtcatgctcgtacggtttaccatataaggaggaatgacttccgtgtaatcatattcatcaacgtgaagatccagcataaagttgtagagcgcgcgttcgaggcgggcgcctaatcctttataaaacacaaaccggctgcctgttacttttgaagcgcgttcgaaatcaagaatgtttaaatggtctgcgatatcccaatgcggtttcggctcatatgaaaatgccggcgcctctccccacttgcgaatttcaatgttatcatcttccgtttccccgacgggcactgagtcgtgcgggatgttcggaatagacagaaggatggtttcgagcgtcgtttcgacagtacgaagctcttcatcaagcttcttaatttcttcgcccacttcgcgcatctctttaataatatgatcagcgtcttttttctcccgtttcaaaacggcgacctgctgagatacttcattgcgttttcccttcagttcttctactttaccgataagctctcttctcttttcgtccagctcttcaaacttgtcaaagtcagataagtcttcgccttttggaatgagcttcgcttttacctcttgaaaattggctctcagcaccttcgtatcaatcatgcctaacaactcctatctgtttttatcgaaaataaaaaagagccctcatcccctaaaagggacgagagctctcgcgttgccaccctgattgaaaacaagctcacacttgcttcccgctttaacacataacggttttcccgtaaatgcctactagttttcagcatttcgctcaaggacggattcggacagcatctttcaccgattcgcaccacccatcggctctctttgaaagagaggctccctactgcttcctgtcaacgcttttcgatctttatttgtgtttataatgtactataagtatcagcggttttcaactgttttatacagctgtttcctgcttatgcttttccgccatcttcacaaacagctctgtcacccggtgatcatccgtcagttcaggatggaacgagcagccgaggaaattcccctgctttgcagccacgatgcgtccgttatgctcacaaagcacttcaacatcttctccggcttctaaaatatgcggtgcgcgaataaatacacccgtaaacggctcatcaaggcctttaatcgtcagatcagcttcaaagctgtcaacctgacggccaaaggaattacgctcgacgacaacgttcaacagccctagatgagcgttatccgttcccgctatctctttggctaaaataatcagaccggcgcatgtgccgaacatcggcttgccttgggcggcaaactcgcgaagcggctccataaaatgatatgtatccattaaacgccgcatcgtcgtgctttccccgcccggcaggattaaaccgtcgatgtcattcagctgttcaggacgcttaatgacgacaccttttgaaccacatgcttcaattgaacgaatatgttctcttactgctccttgaagtccaagtacaccaattgttaacatgcttccagctctcctatggttttaccagccgcgttcttgcatacgctgttccggcaatagatttgagatttcgatgcctttcattgctgtgcctaattctttagaaagctcagcgatcagtttgtagtctgtgtaatgagtcgttgcttcaacaattgctttggcgaatttagcagggttgtctgatttgaaaatacctgaaccgacaaatacgccgtcagcgccaagctgcatcatcaatgccgcgtcagcaggcgtcgctactccgccggcagcaaagttcactacaggcagtttgccgtcacgtttgatttgaagaagcagttcataaggagcgccgaggtttttagcttcagtcatcagctcgtcatcgctcatcgcaacaactttgcgcacttgcgcgtttacttttctcatatggcggacagcttccacaatgtttcctgttcccggttcgccttttgtacgaagcatggaagctccttcggcgatacggcgcgttgcttcgccgagatcacggcagccgcatacgaacgggactgtatattcgtttttatttaaatgaaattcttcgtcagccggagtcagaacttcactttcatcgatgtaatctactcccattgcttcaaggacacgcgcttcaacgatatgtccgatacgcgcttttgccattacgggaatggatacagcattcattacttcttcaacgattgtcggatcagccatgcgggcaacaccgccggcagcgcgaatatcagccggaacgcgttctaacgccattacggcaacagctcccgcctcttccgcaatcttcgcttgttcagcatttacaacgtccatgatgacgccgcctttttgcatttccgccatgccgcgttttacacgatcagtacctgtttgagccattatttggtccccctagtcaatgtatagttagataatttctatctcttattgtatcccagaaatacaatatttcatatgggtattcttattttatagcgagatgaataagatagatatcatttttttactaataatttggttttttcagtatattaagcaaaagagccctaactttcatcagagctctttcttatttctaaaaccagcctgttaccgtgtcaacggcgctgttccagataccggagaagaatccgccgatgccgcgcatcatctgaacaaaccagtttgctttatctacatcatttttcgtaacaagattcacgctgaactctttggttttgaggaagccatagtctttgtcactgcctttgtatgtaactgtcagcgttccgactttcgttccctttttcacaggagccgtgatttcttttttatctaaagtcacttcggctttatagttcttttcatccccgcttttcacaggaatagaaagcgccttgtcagtaacaatatcgacttgcttgtctttccctttttcaacgtcaatcgttttgtgcccttttacttgagagccttcagggtaaagatctttcattgagaaattgctgttaaatgcgtaatcgagcatttttttcgtttcatcaaaacgtccggtatgcaggttgccttttgcgtctaatacaacggtgatgacccgcattccgttccgctgtgctgtgcttgtaaaacaagatcccgcagaatcagtagaacccgtttttaagccgtcaacgccagggtattcagaaacaagaccttttaacatgaagttccagttcggcatgtccatttcatcatcagtgccggctctgaatttcgtcttagcgatgcttgttgttttgagaacttccggataatcagtgatcaggcggtctgcaagaagcgccatgtctttagcagaaacttcactttcttctttaacgccttctccttgcggctgcttgccgtgaaggtcttcattcacaagccctgtggcatttttaaagtcatagtttgtcatgcctaattctttggctttcgcattcatttcagcgacaaatttcgtttcagttccggcaagaatttcggcaactgcaatcgcggctccgttagcagagtaaatcgccatagcctgatacagttctttaaccgtgtatttgccgtcttttcgaagggggacgtttgataaactgttgtcttgagaaatttcatagacataatcatcaggagtatacgtttgatcccatttcacttttccttctttaatggcttccagaagcagatattcagtcatcatttttgtcatgctggcaatcggcagtcttttgtctgcatttttactgtataaaatttttcccgatgaagcctcaatcattatcgcagctgatgcgttgacatcaatcgggtcattgccggctgcctccgctttagacatcggaacaaagcaagttgcggccagtgccagtaccactaatgacaccaacagctgtttccatttcgtgatgttcaatcttacgacctccgtcattcattttaaatctataattaagccgttaaggacatattcaaattcaaaacacaacagtataaattttatcacactcgatataaaaaaaatagacagagtcagcgaccctgtcaaatgttttttatttgtaacaattatgagattgtatagtttggtgattctttcgtaatttggacatcatgcggatgactttcgcgaagtccggcacctgtcatacggatgaattgagcctcttctcttaaagcgcgcaagtcttttgaaccgcaatatcccatacctgaacgaagaccgccgacaagctgatacactgtttcttctacaggacctttgtacggagtccgtccttcgataccttcagggacgaatttcttattttcttcttggaaatatcggtctttactgcctttttccatggcagcgacagaacccataccgcgatacactttaaatcttctgccttgatagatttcagtctctcccgggctttctgaagtaccggcaagcaggcttccgagcattacagcatgtccgcctgaagccaacgcttttgtaatatctccggagaatttaataccgccgtctgcgataattgtcgcgccgtgttttctcgcttcagtggcacaatcataaatggcagtgatctgcggtacgcctacacctgcaacgacgcgtgtcgtacagatagaaccaggtccgattcccactttgacaatatttgctccggcttcaatcagagcttttgtcgcttcagccgttgcaacatttcctgcgataatgttcagttcaggatatgtttcacggattttcgcgactgtgttcagtacgcctctggaatgtccgtgagccgtatcaaccacgataacgtcgacattcgcttcaacaagcttgctgacgcgtgtcattgtatcgcctgtcacgcctaccgcagcgccgacaataaggcgtccgtgttcatctttagatgaattcgggaattcgataaccttttcaatatctttgatcgtaataagaccctttaatttgttttggtcatccactaacgggagtttttcaattttatgtttctgtaagattttttctgcttcgtctaatgtggttcccacagaagccgtaaccagctcttcttttgtcatgacatcactgattttcattgaataatcagagataaagcgaagatcacggtttgtaatgataccgacaagcttttgatcgtctttattatctacgatcggaacaccggaaattctgtatttccccatcaaatgctccgcatcgaatacttgatgatcaggtgttaaaaagaagggatttgtaataacgccccgttcagaacgtttgactttgtcaacatgttcagcctgctgttcgatggacatgtttttatggataatgcccaagccgccctgtctggccatcgcaatcgccatagctgattctgttactgtatccattcccgcactgatgacaggaatattaagctttaacgtctttgtcagttcaacagataaatccacatcacgcggaagtacgtctgattgagccggtacgagcagtacatcatcgaacgttaagccttcttttgaaaatttactttcccacattagtaaatccccctcttttcggcaaaatattatatgtagattatcaactagaaaacagcatgtcaaggaagcgaaaaagagttgaaatatttagataaaggaaagggtttaaaaatacatatgagagatcatgagtggaaagagttatcattattttattctgtagaatcttcccagaaatttctaaataaagtctatacagaaagcagcatggaagaaccaaaacgatatgcgtttaagaacagtgagcgcttcatattctttatcaaacacgccgagtccttctataagcaggcatctctttcccctttagaaattaagcctattctgttgttttacgggatgtcacaattgctgaaagcctgtcttctgaccacagatccaagctatccaagccacgcctcagtactcgcgcatggcgtgactgcccggaaacgcaaaaagcaaaattactcctttagggatgatgaagtgaaggtgcagcgcaatggtttatgtattcatgtaatgaagcacttattcgggatagctggtcttgaggaagaacggtacacaatgaagaaattgctgacagccatacctgaattgcatactgtcttttacttccaagagaaaaagaattggctgacccgtgtagagctgaaagatgaccttatttcagtgcctgagcatgcggtgattcattacaatatgtctgattcccgctttgctgaatatatcagccatcatttgaagtggtcttttctgaggaaagaccataaccacttggtttttgaggctgacccgatagacagagaaccttggtcttcgccaaatttattgtttcacttggagaaaaatcaatattacattccctctcagcgtgatcacttcctgcatcttccggaaatgattattcattatttggtcctctacaatatcgggatgattgcgagatatgaaacggagtggtggtatgaactgctgacacagcatgtcagtgatgattatgtgatgatccgccggttcttagaggtcacggaacgcaaatttccgtattacgtttctaatttcctgaagcagtacttataaacaaaaaaggcagctcatgatgagctgcctttaccgtaatgatagcttggcggcgtcctactctcacagggggaaacccccgactaccatcggcgctgaagagcttaacttccgtgttcggcatgggaacgggtgtgacctcttcgctatcgccaccaaaccattgagagtgttctctcaaaactagataacagtaagcatacattcaaattggttaagtcctcgatcgattagtatctgtcagctccatgtgtcgccacacttccacctcagacctatcaacctgatcatctttcagggatcttacttccttgcggaatgggaaatctcatcttgaggggggcttcatgcttagatgctttcagcacttatcccgtccgcacatagctacccagcgatgcccttggcagaacaactggtacaccagcggtgcgtccatcccggtcctctcgtactaaggacagctcctctcaaatttcctgcgcccgcgacggatagggaccgaactgtctcacgacgttctgaacccagctcgcgtaccgctttaatgggcgaacagcccaacccttgggaccgactacagccccaggatgcgatgagccgacatcgaggtgccaaacctccccgtcgatgtggactcttgggggagataagcctgttatccccggggtagcttttatccgttgagcgatggcccttccatgcggaaccaccggatcactaagcccgactttcgtccctgctcgacttgtaggtctcgcagtcaagctcccttgtgcctttacactctgcgaatgatttccaaccattctgagggaacctttgggcgcctccgttaccttttaggaggcgaccgccccagtcaaactgcccacctgacactgtctccccgcccgataagggcggcgggttagaaggtcaatacagccagggtagtatcccaccgatgcctccaccgaagctggcgctccggtttccaaggctcctacctatcctgtacaagctgtaccaacattcaatatcaggctgcagtaaagctccacggggtctttccgtcctgtcgcgggtaacctgcatcttcacaggtactataatttcaccgagtctctcgttgagacagtgcccagatcgttgcgcctttcgtgcgggtcggaacttacccgacaaggaatttcgctaccttaggaccgttatagttacggccgccgtttactggggcttcaattcgcaccttcgcttacgctaagcgctcctcttaaccttccagcaccgggcaggcgtcagcccctatacttcgccttacggcttcgcagagacctgtgtttttgctaaacagtcgcctgggcctattcactgcggctctctcgggcttgcaccctaacagagcaccccttctcccgaagttacggggtcattttgccgagttccttaacgagagttctctcgatcaccttaggattctctcctcgcctacctgtgtcggtttgcggtacgggcacctctcacctcgctagaggcttttcttggcagtgtggaatcaggaacttcgctactataattcgctcgccatcacagctcagccttcacgggaaacggatttgcctatttcccagcctaactgcttggacgcggatatccaataccgcgcttaccctatcctcctgcgtccccccattgctcaaatggtgaggaggtggtacaggaatatcaacctgttatccatcgcctacgcctttcggcctcggcttaggtcccgactaaccctgagcggacgagccttcctcaggaaaccttaggcattcggtggaggggattctcacccctctttcgctactcataccggcattctcacttctaagcgctccacaagtccttccggtcttgcttcacagcccttagaacgctctcctaccactgttcgaagaacagtccgcagcttcggtgatacgtttagccccggtacattttcggcgcagagtcactcgaccagtgagctattacgcactctttaaatggtggctgcttctaagccaacatcctggttgtctaagcaactccacatccttttccacttaacgtatactttgggaccttagctggcggtctgggctgtttccctttcgactacggatcttatcactcgcagtctgactcccaaggataagtcatcggcattcggagtttgactgaattcggtaacccggtaggggcccctagtccaatcagtgctctacctccgagactcttaccttgaggctagccctaaagctatttcggagagaaccagctatctccaggttcgattggcatttcacccctacccacacctcatccccgcacttttcaacgtgcgtgggttcgggcctccattcagtgttacctgaacttcaccctggacatgggtagatcacctggtttcgggtctacgaccacgtactcaattcgccctattcagactcgctttcgctgcggctccgcatcttctgcttaaccttgcacgggatcgtaactcgccggttcattctacaaaaggcacgccatcacccgttaacgggctctgactacttgtaggcacacggtttcaggatctctttcactccccttccggggtgcttttcacctttccctcacggtactggttcactatcggtcactagggagtatttagccttgggagatggtcctcccggattccgacggaatttcacgtgttccgccgtactcaggatccactcaggagagaacgaagttttgactacagggctgttacctcctatggcgggcctttccagacctcttcatctacctcgttcctttgtaactccgtacagagtgtcctacaaccccaagaggcaagcctcttggtttgggctggtcccgtttcgctcgccgctactcagggaatcgcatttgctttctcttcctccgggtacttagatgtttcagttccccgggtctgccttctcatatcctatgtattcagatatggataccactccattacgagtggtgggtttccccattcggaaatctccggatcaaagcttgcttacagctccccgaagcatatcggtgttcgtcccgtccttcatcggctcctagtgccaaggcatccaccgtgcgccctttctaacttaaccgttaaaaagaatcactacgtgatatcttgcattactaattgaatgtgaattacttctgttatctagttttcaaagaacacgttggtggagcctagcgggatcgaaccgctgacctcctgcgtgcaaagcaggcgctctcccagctgagctaaggccccgtattgggtaaagatggtgggcctgagtggactcgaaccaccgacctcacgcttatcaggcgtgcgctctaaccagctgagctacaggcccatctaccatatgaaagaatcaaagttccttcaaaactaaacaagacagggaacgttctgtttataagacccaaggtcttatattccgttaaaatccttagaaaggaggtgatccagccgcaccttccgatacggctaccttgttacgacttcaccccaatcatctgtcccaccttcggcggctggctccataaaggttacctcaccgacttcgggtgttacaaactctcgtggtgtgacgggcggtgtgtacaaggcccgggaacgtattcaccgcggcatgctgatccgcgattactagcgattccagcttcacgcagtcgagttgcagactgcgatccgaactgagaacagatttgtgggattggcttaacctcgcggtttcgctgccctttgttctgtccattgtagcacgtgtgtagcccaggtcataaggggcatgatgatttgacgtcatccccaccttcctccggtttgtcaccggcagtcaccttagagtgcccaactgaatgctggcaactaagatcaagggttgcgctcgttgcgggacttaacccaacatctcacgacacgagctgacgacaaccatgcaccacctgtcactctgcccccgaaggggacgtcctatctctaggattgtcagaggatgtcaagacctggtaaggttcttcgcgttgcttcgaattaaaccacatgctccaccgcttgtgcgggcccccgtcaattcctttgagtttcagtcttgcgaccgtactccccaggcggagtgcttaatgcgttagctgcagcactaaggggcggaaaccccctaacacttagcactcatcgtttacggcgtggactaccagggtatctaatcctgttcgctccccacgctttcgctcctcagcgtcagttacagaccagagagtcgccttcgccactggtgttcctccacatctctacgcatttcaccgctacacgtggaattccactctcctcttctgcactcaagttccccagtttccaatgaccctccccggttgagccgggggctttcacatcagacttaagaaaccgcctgcgagccctttacgcccaataattccggacaacgcttgccacctacgtattaccgcggctgctggcacgtagttagccgtggctttctggttaggtaccgtcaaggtgccgccctatttgaacggcacttgttcttccctaacaacagagctttacgatccgaaaaccttcatcactcacgcggcgttgctccgtcagactttcgtccattgcggaagattccctactgctgcctcccgtaggagtctgggccgtgtctcagtcccagtgtggccgatcaccctctcaggtcggctacgcatcgtcgccttggtgagccgttacctcaccaactagctaatgcgccgcgggtccatctgtaagtggtagccgaagccaccttttatgtctgaaccatgcggttcagacaaccatccggtattagccccggtttcccggagttatcccagtcttacaggcaggttacccacgtgttactcacccgtccgccgctaacatcagggagcaagctcccatctgtccgctcgacttgcatgtattaggcacgccgccagcgttcgtcctgagccaggatcaaactctccgataaagtagtttgactgactacgcacatcgctgtgcgatttatttaaaactttgaattaacaggtacgttttgtcttgtttagttttcaaagaactttgttgcttctctcgaagcgacctcttaatcataacattttcagtttgctaggtcaatacttttttaaaaaatattttcgctaggcttgcctttctattaaaaagacaacaaaaagaattatatcagtatcatcgctatgtgtcaaagctttttttcatttctttatatagtaaaagcgcagcctgttgcagctgcgctttttcgtttatacttcttccgtttcttccggctcttcttcattcttttccacaagcgccacagtggctacatgctcttgatcagacatgcggatcagacggacgccttgtgttacgcgtcccgtagtggaaatatcattaatatccattctgattaacacgccgcttgccgtaataatcattaagtcctcttcgccttttgttgctttcacggttactaacggaccgttgctgtcagtgattttacatgttttaaggccttttccgcccctgctttgaactctgtattctgaagccggtgtgcgtttgccgtagccgttttctgtcactatgaggacatgggagtcttcttcaagaatctccatgcctactacgacatcatcgtctgtcagcgtgatgcctttaacacccgcagctgtgcgtcccatttgtcttacatctgcttcagggaaacggatcagcaaaccgttcttcgttccgatgatgatttgtttcttgccgtcagtcaggcggacggccatcagttcatcgtcttcccggagacctagggcgatcagcccgttattccgtatattcgcaaactgggacagtgccgtacgtttcgacaccccttgtttggtcgtaaagaagaggtattgctcctcatcaaacgtgctgaccggaataatagcattaatccattcgcctttttcaacctccagaaggttaataatcggaatgccttttgccgtacggccgtattcagggatttcatatcctttagaacggtataccttccctttattagagaagaacaggatcgtatcgtgcgttgatgtggaaattaagtgttccacaaagtcatcttcattcgttcccattccctgtacgccttttccgccccgtttttggctgcggtatgtggacgccgggagacgtttaacatagccgttatgggtcagtgtgatgacgatattttctctctcgataagatcttcatcttcaattgtttcaagaccggacgtcacgatttcagtgcgtctctcatcattgaaacgctctttgatttcattgagctcttcacgaatgatctcaagaactcttgcttcattggctaaaatatctttcagctcggcgataagcgcaacaagtgattgatattcctcttcaatcttttcgcgctccagaccggttaatcgctgaaggcgcatatccagaatggcttgcgcttgtttttcagtcagtgagaattgttcgatcaaacctgttctcgcaatttcagccgtctgggaattgcggataagagaaataacggcatctaaatgatcgagagcaattcttaaaccttccagaatgtgagctctcgcttccgctttgcggagttcgtaagccgttctgcgccggatcacaaccttttggtgatcaagataatgctccagacattgtttcaggcttagtaccttcggctgtccgtcaacgagcgccagcaggttgattccgaaagacgtctgcagggccgtttgtttgtacaggttattcaaaatgacgtgagcattggcgtcacggcgaatctcaatgacgattctcattccgttacggtcggattcgtcacgcagatccgtaattccttcgatttttttgtcccggacaagatctgcgattttttcaattaatctcgctttgttcacctgataaggaagttccgtgacaataattctttcttttcccgatgatgtctcttcgatttcagccttagcccggatcgtaatggatccccgtccggattcatatgccttgcggatgccgctccggcctaaaatctgacctgcagtcggaaaatccgggcccgggatgtattccatcagctcctggtttgtaatctcaggattctcacttacggcaagcacgccttcaatgacttccccaagctgatgcggaggaatatttgtcgccattccgaccgcaataccggcagctccgttgacgagcagattcggaaatctcgaaggcatgacgacaggttctctttctgcgccgtcatagttatcttgataatcaatcgtatctttcgtaatgtcccggaggatttccattgcgatttttgacattctcgcttctgtgtaacgcatcgcggccgctgagtcgccgtcaaccgaaccgaagttgccgtgtccgtcaacaagcatgtagcggtagttaaaatcctgcgccattctgaccattgattcgtaaaccgctgagtcaccgtgcgggtggtacttaccgataacttcaccgacgatacgggcagattttttatatggtttgtcactggtcatgcctaaatcattcattgcgtacaaaatccgcctgtgaaccggcttcagaccgtcacgcacatccggaagcgcccgggagacgataacgctcattgcatagtccaggaaggatgtccgcatttcctgactgatattgacttcacgtacttgtggtgtgttttgttcactcattaaaaaaacctccctgaagtatcacatgaaataatgtgggagtagattgtccattatgatcttcaatacgatttcactattctccattatatcaataaacttgtgtttatacacattaatttagtagaatatacgggttttgcgggttttcagaggctttagaagccgctttgagaaaaaagccttatttcttaacgaaaataaggctttcttggttaaatatcaagatttttcacgtatctggcgtttgcttctataaagtttctccgcggttctactttgtcacccatcagcatttcaaaagtctcgtcagcgtccattgcatcttcaagattgacttgcagaagcgttctggtcgcagggtccattgtcgtttcccaaagctgagtcgcgttcatttctccaagacctttataacgctggaggccgggcttaggtgattgcggaagctcttttaacagctcatcaagctgcttatcgttataagcgtattccacccgttttccctgctgcactttataaagcggcggctgggcaatgtagacatagccgttttcgatgatttcccgcatgtatctgtagaagaacgttaataaaagcgttctgatgtgggcgccgtcaacatcggcatccgtcatgatgaccactttatgataacgcgctttttcaagattaaaatcttctccgattcctgttccgagagccgtgatcattgatctgacctcattgtttgagaggatcttatcaagtctggctttctcaacgttcagaatcttaccgcgcagcggcagaatagcttggaaatgacggtcccgtccttgtttcgctgatccgcccgcagagtcaccctctacgatatacagctcggaaatgctcggatctttagaagaacagtccgccagtttgcccggcagattggaaatctcaagcgcacttttgcgccgggtcaattcccgtgcttttttcgctgccatccgcgctcttgcggccattaaacctttttcaacgattttgcgggctgagtccggattttcaagaaggaatgtttccagcgcagaagaaaacagcgtatcagtgatcgttctcgcttcggagttgccgagcttggttttcgtctgcccttcgaattgcggatcagggtgcttaattgaaataatggcagtcagcccttctctcacatcatccccgcttaaattcggatcattttctttgaaaatcccttttcttcttgcatagtcgtttatgacacgggtcagaccggttttaaatccggcttcgtgcgtcccgccttcgtatgtgttgatattattcgtgaaagaataaatattgcttgtatagctgtcgttgtattgcaatgcaacttcaaccgttatgccgtctttctcgccttcgatataaatcggctcttcatgaacgacttctttggaacggtttaagtactcaacatagcttttgattccgccttcgtagtggtactcgtttttccgttcttgtccttcacgtttgtcttcaatcgtgatgtttacgccttttgtcaggaaggccaattcccggacacggtttgaaagcagatcatagtcgtatacggttgtttctttgaagatttccggatccggaacgaagtgcgtaatcgttccggtcttatcagtatcaccgatcacttcaagatcggccacaggtacaccgcgctcgtacgcctgatagtggatttttccgtcacgatgaaccgtaacgtcaagagtggtcgacaaggcgtttacgacagatgcccctacaccgtgaagaccgccggatactttatatccgcttccgtcaaatttaccgccggcgtggagaacggtcatgatgacttcaaccgcagggcggcccatcttctcctggataccgaccggaattccgcgcccgttgtccttaacggtaatgctgttatctttttcaatctcgatgttaatatctgtacaataaccggccagggcttcgtcaatactgttgtcgacgatttcccacaccaagtggtgaaggcctttgctgttagttgatccgatgtacatccccggtctctttcgaacagcttccaaaccttctaatacctgtatctgattctcatcataactattttgctgctgttccatagccatgcacattcacctacacttttcttaaacgatatattcattgtaaagatccgctaagaatctatttctaacataaattgcgcacgtttcttcagtgtgccggaagataagggagagtaatatatattctcagtcgtgactacgatagactttggcgtgccgtttacggacggcactactttttctttctgtctgtccagaaattcttcaacgatcggcgatacattgaccttgcagtcaaaaatgccgacgatatcgcgtgttgaaacgacaaagtcgtcacctaaatgaatatacaatcgctcacctcatttcttcacttcactaacgtaccgttttccacacggaacattcctgcttgatgtaaggtatcgtggtcaatgccatccacgcttgtcgtggtgacaaatgtctgcacacggccttggatcgtatgaagcaaatgggactgtcggtaatcatccagctcgcttagtacatcatccaaaagtaaaatggggtattctccgatttcttcatgaatcaaatctatttcggccagcttcaaagacaaagccgtcgtacgctgctgtccctgcgaaccgtacgtctgcacatcgcgtccgttcacataaaaaaggacatcatcccgatgcggtccgaataatgtgacgcctcgttctatttctttttcttttaatttcgaaaaagactcctggtagctgttacctattttcgacaaatctttgggatctgatacatcaagcgccgtgtggtacttaagcgtcagttcttcaagtccccgggaaatgccggaatggatcggctgcgcccatttttcaagctgcgccgtaaactgcagacgtttggcgacaacttttgcggctgcttcaatcagctgatcagtgagaacgtcaagcatggtccggtcagtctgtttccggctttgcagctgtttcagaaaatgattccgctgtgaaaggattttttgataaagagataaatcatacagataaacggcagaaacctgcccgatctccatatcgagaaatctcctcctcacctgggggcttcctttgacgagatttaaatcctcaggggcaaacataatggtgttcagcgctccgacatactgactgagtttttgctgctctatatgattgaccttgccctttttaccttttttggagatgacaagctgcatcgggatatccccgtttcgcttcatcactcttccttctattttagcatagtcttcgtcccaccgtataagttctttgtcatttgaggtgcggtgtgattttgccatcgaaaggacatagatggcttccatcagattggttttgccttgggcattttccccgatgatcacattcaccttgttttcgaattgaagctcagcgcgctcataattacggtaggatgttaattctaaattttggatatacaaccgctgtcacccgctttaattgacgacttgaaatgaaccaaatccttcaatcgcgaccacgtctccaacgtaaagctttctgccgcggcgattgtcaggttcattgttgacagtcacctcatgctcgctcagaaaccacttcgccatgccgccggactgaatcacatctgctaattttaaaaactggccaagcgtaatcatttctgtatcaatcgaaatcggatttgccatattatcgacctctttcaaatatcactaatatctaattgtactaaaaaatcctgaaataaggaaagggaaaacttgagggagcggctgatgaatagaaaagctgccgaactaagccggcagcacattctgtttgattaatacgttctgaccggaaggatgagctgaacgatggtttcatcattcggcgtacggataagaaacggtctcatcgctcccgtaaaactgatacggatgtccgctccttcaagtactttcagtgcgtccatcatatat

SEQ ID NO: 263 - protein, 136 aa, Bacillus amyloliquefaciens
MNTAYRVWDGEQMHYWDDEGLSLTIKNNGDWTLKRLYTDVLVPVVDSTNRNAALMWGTGLKDKNEKMIYEKDVIKFKSVYCENKIIKAVVKFRDSLGSFVFNRGDDQDFWRMDVSLSEIEVIGDIYQNPELLEGAE

SEQ ID NO: 264 - protein, 63 aa, Bacillus amyloliquefaciens
MKIAKVNNNNVVSVLKEGNQELVIMGRGIAFQKKTGDPADEARIEKVLTLDNKDVSEVQNPFV

SEQ ID NO: 265 - protein, 134 aa, Bacillus amyloliquefaciens
MKNGYAKTLSLGIQHVLAMYAGAVVVPLIVGAALGLNAEQLTYLVSIDIFMCGAATLLQVWRNKCFGIGLPVVLGCTFTAVAPIISIGKEYGISAIYGSILASGLLVILLSFFFGKLVSFFPPVVTGSVVRIID

SEQ ID NO: 266 - protein, 842 aa, Bacillus amyloliquefaciens
MKRKKDGLSKQVHIYSVDTSAFYNDKENSLHNKILKSYRYRDYLKTLDNVNNKHKKYISQRITYLKECLYSAFEEHNDIRTLRTDSLRDNKVISLFDSVLTRTLGIKENTLSEEIMVVQTYHFEVLKDIIDQGFLHNNEKYVYFTSSAGQIRTKKSCFIKKSTYDKYQDALTCGLSIEKINSLGGSSINKWNSYMALSNSASSPWEIDIDKAIVVDDLETDVSSLVDYIDRDTYEITRKTMNIPIEHTDGCGMILPTLSSKSFMVRLPWVKGLLVPFDFRKFAEENKAFKVTDIYGKEWDVVKDDVQIIFTKSQFKMWKYYSSWEEYQGNYKKYGCLGAKLNEEDPSVEGKLTYQMLQTLTDISGEELIQMSSKTVKEITTLGTDKETMLRVLGATEKKKHRTALQDALLLYPELLNDDHTKEIIKNKKKSMIKDAKSGKLLVDGARYTYLCPDLYAFCEKLFLNIQNPKGLLSGNDVHCSLYDEGYIDILRSPHLFREHGVRWNKKDEKYEKWFITPGVYTSIHDPISKLLQFDNDGDKALIISDELIVNIAKRNMENIVPLYYEMSVAQKQKINSRNIYEALTLAYGINIGEYSNNITKIWNSDNINLDVIKWLCMENNFTIDFAKTLFMPTRPDHVDEKIKDYIKNKVPHFFINAKDKEEHSVELINESTVNKLDSIIPSDRINFAAVAGKFDYRFLLKNRDIKLDDAIIREYKRLDQNKKWLMNDEDIKPGQKLYVYKVIKDRLLKIYNDEQSVADVLVKHLYKKKSKFKSTLWECFGDLILENMQNNLKRFKSCYSCGKMFKSISNKSKYCNKCALEIEKKNHRLRQKKYSKKKMTK

SEQ ID NO: 267 - protein, 370 aa, Bacillus amyloliquefaciens
MFGFIGVGQAGGSIADEAMKRGFHSVAINYSLSDLNSLINIQDKLHLVGTEGVGKDRSVAAKHMKNNWESSIEFIKNTMEKPSVQVIFVVFSAAGGTGSGVAPILLELLNECLTHKTIVAVPILPDNNEVLVNQMNTLELLDDLSMPETCVLPLDNQMVLSKYEGKISESRLYKETNKMFLDLIEVLLNYTDRGSKISTLDRKDLNQLFDTPGIMTIAQTDLNEFTIEGKYFDKLHEDIQKSWNNSIFTPVEFTNVMRAGVILDVHEFLTEHISYNELFNVFDNKMPLDLFKGHYDKGNRAITILSGLTWINERMKQLDDLIESGNTEVKETTVYKAKNRRREDLFKPRKLENKESKKTSYMEALKRLKR

SEQ ID NO: 268 - protein, 382 aa, Bacillus amyloliquefaciens
MNLKQMIKNECEKDNQLAAKLSKIAGYKKVNGFYKFINTPEKEMDNLGGLINIVKSLFPDNEEQLLSDYFLSLDPNKKCARQSVEYSDINQWDTLTDKIVSRLSSSKNLASQEWGNIYSIHRRLSESKISLTDAIRATGKCKTDEMLFFSNAMLMYEYLKVGEFGLMKSTLSLLNFNDLPEGFVKDCYMNRISLLNANIYLNDNEIEKSRYYSEQVIQNSNINRLKVFGHLTYGNTLIFESYSKAKEQYLKGLEFARDNEHHKYKLRLALCFLSNLWNKDNKWLDFDTDNIPDKIEVAYYYTNNKEFNKAEKVINELENMELYEYDSGILDYIKGILYQNKNYFYESTAKLKKSGDKLFINLPLAELRKMGCDEKLLELIMV

SEQ ID NO: 269 - protein, 338 aa, Bacillus amyloliquefaciens
MDVYDLKNHIIEKPEYIVLILEQTGFYNVDERGNEYRCARKKGRNPTSVKVNKTTLGATCFSTNLKGDLITLVQNKLGLSFPKTIKRISEIVDYKSEEEYKPPELPFGGFYKNIRRLSNPMDLDLETYSDDILDQFVSVPNKLFYEDGILPLTQSLFQVGYDSVSGRITVPWKSLSGELCGVMGRLNKKEVNDEETKWLPIISFPKSKTLYGFVENYSSIREKSIVMIGESEKHSMALASKGLNVGVSLGGSFLSEIQANHIKSMFPKKSLVMMDEGLGEEHSVEIANSLKFENFFENEVGYIFDRENKYLPKGSKMAPADLDKSTLHRLIRDCTVWI

SEQ ID NO: 270 - protein, 67 aa, Bacillus amyloliquefaciens
MPKFWSYPEGLKVIINENAKNACPHHVGREGKIIELLHSATYDYAVSDETGDITFFKEHELNPAKGG

SEQ ID NO: 271 - protein, 172 aa, Bacillus amyloliquefaciens
MKKVIAIDMDQVLADLLSDWVAYINTYDDPFLKEEDILCWDISKYSNTQNNVYRHLDYELFRNLDVIEGSQRAVKELAKKYEVYVVTTATNHPESLKAKLEWLTEHFPYIPHSNVVLCGNKNIIKADIMIDDGVHNLETFDGMKILFDAPHNRNDNRFIRVMNWEEIERKLL

SEQ ID NO: 272 - protein, 396 aa, Bacillus amyloliquefaciens
MTEKYDKWTRLLDMIEPNYAFESAVVGNSIYVLGGARNQKYNKNYSFDTISQKWTQGLDIPTPRVGSCTAVIGNYIYVLGGYKGANVYSSVDVYDTKTNTWGRVPDIPTPTCHASAAVINDTIYLIGGFDTDAAHSQHYAFDTLSKTWSVKKAPPINIYATETEVFNGKIYLVGGQTKEVVQGHIRSDLNEYIYEYDPVMDRWNRKKFLGPLQNTSTAVLNNKIYIIGGRKNPSVIEPLTKVYDPIKDEISVEKPYPFERYDARIAAVGDNLYLFGGLTPSGYALEYLHALTPVKTEEDKDGEPKNPEEPPNKQPASNRAILLVTMTTGLEKEFDLSMEEIKDFIRWYDQKSSGIGLSRYVIEKHYNNIGPFQNRRDHIVFGNILTFNVSEYTLDK

SEQ ID NO: 273 - protein, 59 aa, Bacillus amyloliquefaciens
MAGYKKAAPRIARLLDYVPESDLADVPDPYYTGNFSEVYALVESGCRHLLETIKKDHHL

SEQ ID NO: 274 - protein, 84 aa, Bacillus amyloliquefaciens
MGKEVVPQAERVLNAIAELHGGIAFDFTSFPRSCEYYLEHGTMMPDDGLETLQHFDALFLGAVGNQKLVPDHVSLWGLPIKIRR

SEQ ID NO: 275 - protein, 347 aa, Bacillus amyloliquefaciens
MTNSVQQDKQVPKKYPQAAVMQMVSGLGFSLAVKTAVELDVFSAFQNGPASAEAIAEALELNPSALFRLLRALESVGLVAQAQNGYYDVTEYGATLMPGKAKSIEPLVEYLLHETVVQSMFKMDYSIKTGKSAFEAIYGDKWYENNSLDQDYLKTMDKAMEIYSKMSLPSILKAYSFEKFDVIVDVAGGMGQLITGILGVAPKSKGILFDLPKTIQSAKKHLASSEMSERCQFTEGSMFEEIPSGGDLYVISKVLNDWDDEHVVAILENIAGAMSDHSKLIIVENVPEADRLSPEEAFRDLLFLVCSAGGRVRKITEFEQLIEKAGLTLLNVIQTPSKYTILECGKK

SEQ ID NO: 276 - protein, 507 aa, Bacillus amyloliquefaciens
MKNTEENKTAIIIGGGIAGMAAGCYLQMNGYSTKIFEMGLLPGGLCTGWKRKGYFFDGCISWLVGSGPNNTFHKFWKELNVIQNMEFINDEEFAVVNFRNGDTFTLYADVDKLEQEFLRVAPEDAETIKLLTDGIRVVSDVELDLDKAPELFDLADFEAFKAKAGPYMKVMGQWGKVTIKEFAQRFKSSFVRENVNRLFWFNVDTPISYFMATLGWANSKSSGHPVEGSLQFAKIIEARYVELGGEIQYKSPVSKVLVENDKAIGIELKNGQCHYGDIVISAADGYKTIFEMLDGKYTDDELTFCYDNLKTSAPQIYVGLGVSKTFEKYPHYLSLELEQPLNAYGCDNVKNIFVKIYNENPSFAPDGKTSIIVYAKTSAEYWETLQKNNREKYEEEKKAIANVMIDELDKWFGEIKSNIDVTDVSTPYTIRRYTNNRNGSWQGWEKQMEGIMHEKKLKRSLPGLKDFYMVGHWSQVGGGLPSVVLQARNLVQVLCKEDGKVFETKIN

SEQ ID NO: 277 - protein, 234 aa, Bacillus amyloliquefaciens
MNSPLRCIEKINNAILFFNFIYNYSYHTIKNGSITLANEGDLMSIIAFLSYVLMTSITPGPSNILMMNEARRAGFIGSWRFNGGILTGFAVLGILSGLFTMSVYHWIPVVEPYFKIAGAVYLLYLAWQISLPKTSKGDSEKTRSSFLSGFLFQMINIKSILFFLTLMSAFILPFQHTYPLIAFWLASAILLGWAALLLWSAFGSVFKHLFEKHDKAFRIVMCLLLIYSAVSIYL

SEQ ID NO: 278 - protein, 211 aa, Bacillus amyloliquefaciens
MKKYLFSAGIIVLTVFTWVCTYSSLPDNLATHWGLNGSANDYQTKANAMMMLIGIMIILYILMVIIPKIDPKNNYKTFIRPYMAIFNTMFAVLFVINLITILTGLGYDLPISYLGNFIVGVIFMVFGNFIQIVKPNFFLGIRTPWTLSSESVWKDTHRVSSKLFVLAGMLMMLAAFLPPVYRVSVIFMAAIGCIILSLLYSYIVYQRQLNK

SEQ ID NO: 279 - protein, 136 aa, Bacillus amyloliquefaciens
MAKIGDGCLELEITPRRYHEAKDDPFISTTFELLEHNKAIARDYSAVLLESEYKMLISDIEALSAGNQDRIRLETIEPFFILSIDKENEHYRFIIRFMENHSNTTFYKLNCNEEKLEIFVKTLKSDLKDSKTLLGR

SEQ ID NO: 280 - protein, 290 aa, Bacillus amyloliquefaciens
MSELVFTRINTKINTSGPIILSMNAAELIVLAQEKVRKEEYINHIFIFRNGDGHLRHRYQIQTSMNIIGVQKSGDLFLFLIHKDYEDGVIQEDPNIYIWHPLKGFYHSLYGGRYIRSMTVDSANNLWLGYDEAGIFSCLDDDISSKGVARFPFEDGTWKSCSDTFRTAPHLIDHFYGAYAKKDAMYLHYRTLGEDYIRKVDLQGETLSFHRADFDFSAQFKKDSSYYFLIRNQASCQIDKALKFHNMTKQAGEYQLTDKISRKPLRFTQVAAYQDKAAGIDESNRLYLLS

SEQ ID NO: 281 - protein, 361 aa, Bacillus amyloliquefaciens
MASIEPRGKNSFRLIVENGYDAKGKRDRRKKTIRIEDPKLLKTKRKLQEYLEDQLHRFRIEVEAGEYIAPEKSTFDSFAEKWIEKKLFNKNGKPYSFTTSVKYSNHLKNHILPALGHKKIDKIKSLHIVDFIDDLSKDGARKDGKPGGLGDQTIKDIFKILQALFKTATEEWKLIKDDPIEGLSSPEAENKEMNFLESDEAAECIKVLYEIDIKWRLYYLAALIGGLRRGEALACEWHLDVDWDKGGIYVNRSISKTINGEPHVKSPKSKSSQRFVKMPDFYMNELAKYYRLWKKEKLLLGDAWEGGEHQYVFHSGKGKPYYYTTPTAKWTKIKKKYGLKDVRLHDLRHTMVALLMEAGES

SEQ ID NO: 282 - protein, 403 aa, Bacillus amyloliquefaciens
MNREKRLELKKVKPKHLQQFNQLLRYVFQVTNSNLHEVGWKEPEIASAKLPVLEQAHVLGWFDKDKLVSQAAVYPFQVRIFNKTFEMGGVTGVGTYPEYANMGLMAKLLYKALVDMRERGQSVSYLFPYSIPYYRRKGWEIISDKMTFEVKDFQLPKMSTVSGEVERVEPEHEVIKEVYSRFAHKSHAAMIRNELAWDEYWRWDLEELTAAVYYDQSRQANGYVLYWIADEVFHIKEMVYVNEEARRGLWNFISAHFSMVTKVVGDNYSNEPIAFLLEDAEIEETISPYFMARIVDIEQFINQYPFKPQKEKRTWSFTLEDPLLEWNQGVFTAEISPEGKAVLSPGGDADAAKLDIQTMTALLFAYRKPEYLHRTGRLECSPDTLEFIEDLLETQTPYFSDYF

SEQ ID NO: 283 - protein, 268 aa, Bacillus amyloliquefaciens
MEIETIVRESEANRIQAQTWFSHPEKSKVSFRYDERETSSIRSISIETFLSFYSSKFNREPYSVLDIGCGQGQVIQYLNSRFQKIELTGIDSSAQAISSAKKLGINASFICSNAENIMQYVSKKQDIIFIHLCFGLFKNPIAIVNTLIHLLSDQSCIYIVDLDRNSLGEGLNTAQSREEEAYLKDQYRASLTLEEFKQLLHVVTKEQHGVSFQVGNSFIGGFDETSSQFFSLMRNRNLQDALRTSVGEQFKQSQMPALLHGWIIKNKR

SEQ ID NO: 284 - protein, 336 aa, Bacillus amyloliquefaciens
MRKRTFHEAYTETLYDIYHNPEFFNSPRGQKSREQLNYHLTLENPIERVTYLSSRKTNIVFNFAEVLWYLSGSNDLDFISYYNKKMPSYSMNKKTLTGTAYGPKIFEFGNAKLNQWNRIKNLLTQEDIDSKRAFIQIFDASELFVLENIDVSCTIGLQFFVREGELYMSSVMRANDAFRGMISDLFSFTFMQELMARELRVEVGEYFHNAGSIHIYDSDHEWAKTVLEEAENHHDIPEFEFPKMPEGNNWPSIETVLKYEELLRKDQISMTKNDIEMLDLPDYWKQILFLFSIYQHIAYKRDMDHSLFQSLLPIYQFFVRNKWFHYFSTEQKEEIQ

SEQ ID NO: 285 - protein, 663 aa, Bacillus subtilis
MRKLYHGACYYPELWDEETIQQDIDIMREVGVNVVRIGEFAWSVMEPEEGKIDVGFFKEIIARLYDSGIETIMCTPTPTPPIWFSHGRPERMHANEKREIMGHGSRQHACTNNPYFRKKAAIITTAIAKELGRLPGLIGWQLDNEFKCHVAECMCETCLRLWHDWLKNRYGVIERLNEAWGTDVWSETYQTFEQVPQPGPAPFLHHASLRTMYQLFSMEMIASFADEQAKIIRCYSDAPITHNGSVMFSVDNERMFQNLDFASYDTYASQENASAFLLNCDLWRNLKQGRPFWILETSPSYAASLESSAYPHADGYLQAEAVSSYALGSQGFCYWLWRQQRSGSEISHGSVLSAWGEPTIGYQKVLAVERARKEIEPIILSTEPVQAEAAMTYSDRAKAFIKTEPHRGLRHRSLVTHFYERILNTGIHRDLIPEGAPLDGYRLLFTPFVPYLSSEFIKKASAFAEAGGIWITGPLTGGRTCEHTIHTDCGLGELEKTSGIKTLFTFPMNENVNTGKAFGITAPLGLWSAVFDTESGNTLGTVESGPGAGHAFLTEQNYGEGKIVMLGSLPSGKEGDAMLEALVRHYAEEAVISSRSDVTPGTIVAPRKGENGLVWIVVNMDGKGGSVTLPEAGTDLLTHRLEKAGRLAVGPHEYRVIQFDNHS

SEQ ID NO: 286 - protein, 686 aa, Bacillus subtilis
MSKLEKTHVTEAKFMLHGGDYNPDQWLDRPDILADDIKLMKLSHTNTFSVGIFAWSALEPEEGVYQFEWLDDIFERIHSIGGRVILATPSGARPAWLSQTYPEVLRVNASRVKQLHGGRHNHCLTSKVYREKTRHINRLLAERYGHHPALLMWHISNEYGGDCHCDLCQHAFREWLKSKYDNSLKALNHAWWTPFWSHTFNDWSQIESPSPIGENGLHGLNLDWRRFVTDQTISFYKNEIIPLKELTPDIPITTNFMADTPDLIPYQGLDYSKFAKHVDVISWDAYPVWHNDWESTADLAMKVGFINDLYRSLKQQSFLLMECTPSAVNWHNVNKAKRPGMNLLSSMQMIAHGSDSVLYFQYRKSRGSSEKLHGAVVDHDNSPKNRVFQEVAKVGETLERLSEVVGTKRPAQTAILYDWENHWALEDAQGFAKATKRYPQTLQQHYRTFWEHDIPVDVITKEQDFSPYKLLIVPMLYLISEDTISRLKAFTADGGTLVMTYISGVVNEHDLTYTGGWHPDLQAIFGVEPLETDTLYPKDRNAVSYRSQIYEMKDYATVIDVKTASVEAVYQEDFYARTPAVTSHEYQQGKAYFIGARLEDQFQRDFYEGLITDLSLSPVFPVRHGKGVSVQARQDQDNDYIFVMNFTEEKQLVTFDQSVKDIMTGDILSGDLTMEKYEVRIVVNTH

SEQ ID NO: 287 - protein, 718 aa, Bacillus subtilis
MVSIRRSFEAYVDDMNIITVLIPAEQKEIMTPPFRLETETTVFPLAVREEYSLEAKYKYVCVSDHPVTFGKIHCVRASSGHKTDLQIGAVIRTAAFDDEFYYDGELGAVYTADHTVFKVWAPAATSAAVKLSHPNKSGRTFQMNRLEKGVYAVTVTGDLHGYEYLFCICNNLEWMETVDPYAKAVTVNGEKGVVLRPDQMKWTAPLKPFSHPVDAVIYETHLRDFSIHENSGMINKGKYLALTETDTQTANGSSSGLAYIKELGVTHVELQPVNDFAGVDEEKPLDAYNWGYNPLHFFAPEGSYASNPHDPQTRKTELKQMINTLHQHGLRVILDVVFNHVYKRENSPFEKTVPGYFFRHDECGMPSNGTGVGNDIASERRMARKFIADCVVYWLEEYNVDGFRFDLLGILDIDTVLYMKEKATKAKPGILLFGEGWDLATPLPHEQKAALANAPRMPGIGFFNDMFRDAVKGNTFHLKAAGFALGSSESAQAVMHGIAGSSGWKALAPIVPEPSQSINYVESHDNHTFWDKMSFALPQENDSRKRSRQRLAAAIILLAQGVPFIHSGQEFFRTKQGVENSYQSSDSINQLDWDRRETFKEDVHYIRRLISLRKAHPAFRLRSAADIRRHLECLTLKEHLIAYRLYDLDEVDEWKDIIVIHHASPDSVEWRLPNDIPYRLLCDPSGFQEDPAEIKKTVAVNGIGTVILYLASDLKSFA

SEQ ID NO: 288 - protein, 407 aa, Bacillus subtilis
MKLAFICTEKLPAPAVRGGAIQMMIDGVTPYFSSRYNLTIFSIEDPSLPKRETKDGVHYIHLPKEHYREAVAEELRASSFDLIHVFNRPLNVSLYKKASPNSKIVLSLHNEMFSEKKMTFAQGKEVLDNVSMITTVSEFIKQTVIERFPEAEDITKVVYSGVDLNSYPPVWTMKGSAVRKTYRKKYGIEDKKVILFAGRLSPIKGPHLLIHSMRRILQQHPDAVLVIAGGKWFSDDSENQYVTYLRTLALPYRDHIIFTKFIPADDIPNLFLMADVFVCSSQWNEPLARVNYEAMAAGTPLITTNRGGNGEVVKDEVTGLVIDSYNKPSSFAKAIDRAFTDQELMNKMTKSARKHVEALFTFTHAAKRLNTVYQSVLTPKNKQFPPPFLTQNFDLSSINQLFVKAKT

SEQ ID NO: 289 - protein, 377 aa, Bacillus subtilis
MKIALIATEKLPVPSVRGGAIQIYLEAVAPLIAKKHEVTVFSIKDPNLADREKVDGVHYVHLDEDRYEEAVGAELKKSRFDLVHVCNRPSWVPKLKKQAPDAVFILSVHNEMFAYDKISQAEGEICIDSVAQIVTVSDYIGQTITSRFPSARSKTKTVYSGVDLKTYHPRWTNEGQRAREEMRSELGLHGKKIVLFVGRLSKVKGPHILLQALPDIIEEHPDVMMVFIGSKWFGDNELNNYVKHLHTLGAMQKDHVTFIQFVKPKDIPRLYTMSDVFVCSSQWQEPLARVHYEAMAAGLPIITSNRGGNPEVIEEGKNGYIIHDFENPKQYAERINDLLSSSEKRERLGKYSRREAESNFGWQRVAENLLSVYEKNR

SEQ ID NO: 290 - protein, 351 aa, Bacillus subtilis
MYQKEHEEQIVSEILSYYPFHIDHVALKSNKSGRKIWEVETDHGPKLLKEAQMKPERMLFITQAHAHLQEKGLPIAPIHQTKNGGSCLGTDQVSYSLYDKVTGKEMIYYDAEQMKKVMSFAGHFHHASKGYVCTDESKKRSRLGKWHKLYRWKLQELEGNMQIAASYPDDVFSQTFLKHADKMLARGKEALQALDDSEYETWTKETLEHGGFCFQDFTLARLTEIEGEPFLKELHSITYDLPSRDLRILLNKVMVKLSVWDTDFMVALLAAYDAVYPLTEKQYEVLWIDLAFPHLFCAIGHKYYLKQKKTWSDEKYNWALQNMISVEESKDSFLDKLPELYKKIKAYREAN

SEQ ID NO: 291 - protein, 353 aa, Bacillus subtilis
MAENHEVIEEGNSSELPLSAEDAKKLTELAENVLQGWDVQAEKIDVIQGNQMALVWKVHTDSGAVCLKRIHRPEKKALFSIFAQDYLAKKGMNVPGILPNKKGSLYSKHGSFLFVVYDWIEGRPFELTVKQDLEFIMKGLADFHTASVGYQPPNGVPIFTKLGRWPNHYTKRCKQMETWKLMAEAEKEDPFSQLYLQEIDGFIEDGLRIKDRLLQSTYVPWTEQLKKSPNLCHQDYGTGNTLLGENEQIWVIDLDTVSFDLPIRDLRKMIIPLLDTTGVWDDETFHVMLNAYESRAPLTEEQKQVMFIDMLFPYELYDVIREKYVRKSALPKEELESAFEYERIKANALRQLI

SEQ ID NO: 292 - protein, 421 aa, Bacillus subtilis
MKMAKKCSVFMLCAAVSLSLAACGPKESSSAKSSSKGSELVVWEDKEKSIGIKDAVAAFEKEHDVKVKVVEKPYAKQIEDLRMDGPAGTGPDVLTMPGDQIGTAVTEGLLKELHVKKDVQSLYTDASIQSQMVDQKLYGLPKAVETTVLFYNKDLITEKELPKTLEEWYDYSKKTADGSNFGFLALFDQIYYAESVMSGYGGYIFGKDKDGSYNPSDIGINNEGAVKGAALIQKFYKDGLFPAGIIGEQGINVLESLFTEGKAAAIISGPWNVEAFSKAGINYGITKLPKLENRKNMSSFIGVKSYNVSAFTKNEELAQELAVFLANEKNSKTRYEETKEVPAVKSLANDPAIMKSEAARAVTEQSRFSEPTPNIPEMNEIWTPADSALQTVATGKADPKQALDQAAETAKGQIKAKHSGK

SEQ ID NO: 293 - protein, 131 aa, Bacillus subtilis
MTDTRHMYGGPGFGHYQGFGIGHPGYGMYGGHPGFGMYGGYPDHGIHGGVGGYPGYGTYGGYGGSGGYPSGGYGGSPGTVNYPNMHHENDGHHHYYHHHHDGKDNLHHHHHDGHYGHHHHHMGHWGKDGYK

SEQ ID NO: 294 - protein, 50 aa, Bacillus subtilis
MVRNKEKGFPYENENKFQGEPRAKDDYASKRADGSINQHPQERMRASGKR

SEQ ID NO: 295 - protein, 258 aa, Bacillus subtilis
MSFFKKLAASAGIGAAKVDTILEKDAYFPGEEVQGTVHVKGGKIAQDIRYIDLQLSTRYVIVKDDEEHRKYATIHSFRVTGSFTIQPGEEHQFPFTFTLPLDTPITVGKVEVAVVTDLDIQGGIDKSDHDRIFVEAHPWIENVLEAIENLGFRLNEADCEQAPYFQRRLPFVQEFEFVPTSGYYRQMLDELELIFLLDEDGLEIIFEVDRRARGLRGWLEEMYNDGEQLVRVRFSQSELEDTEELEEVLEEILDQYAE

SEQ ID NO: 296 - protein, 49 aa, Bacillus subtilis
MGFGYGFGGGYGGGCYGGYAGGYGGGYGSTFVLLVVLFILLIIVGASFF

SEQ ID NO: 297 - protein, 82 aa, Bacillus subtilis
MDYPLNEQSFEQITPYDERQPYYYPRPRPPFYPPYYYPRPYYPFYPFYPRPPYYYPRPRPPYYPWHGYGGGYGGGYGGGYGY

SEQ ID NO: 298 - protein, 337 aa, Bacillus subtilis
MKTITIAAKEAKELVRQKLASAGLNERDAEKVADVLVHADLRNVHSHGVLRTEHYVNRLLAGGINPGAQPVFKETGPVTGVLDGDDGFGHVNCDMAMDHAIDMAKKKGVGMVTAVNSSHCGALSYFVQKAADEKLIGIAMTHTDSIVVPFGGRTPFLGTNPIAYGVPAKHKKPFILDMATSKVAFGKILQAREEGKEIPEGWGVDENGEAVTDPDKVVSLSTFGGPKGYGLSIVVDVFSGLLAGAAFGPHIAKMYSGLDQKRKLGHYVCAINPAFFTDWDTFLEQMDAMIDELQQSPPAVGFERVYVPGEIEQLHEERNKKNGISIARSVYEFLKSR

SEQ ID NO: 299 - protein, 494 aa, Bacillus subtilis
MFTMDDLNQMDTQTLTDTLGSIFEHSSWIAERSAALRPFSSLSDLHRKMTGIVKAADRETQLDLIKKHPRLGTKKTMSDDSVREQQNAGLGKLEQQEYEEFLMLNEHYYDRFGFPFILAVKGKTKQDIHQALLARLESERETEFQQALIEIYRIARFRLADIITEKGETQMKRTMSYGKGNVFAYRTFLKPLTGVKQIPESSFAGRSNSVVGVDVTCEIGGEAFLPSFTDGDNTLVVATDSMKNFIQRHLASYEGTTTEGFLHYVAHRFLDTYSHMDKITLTGEDIPFEAMPAYEEKELSTSHLVFRRSRNERSRSVLKAERSGNTITITEQYSEIMDLQLVKVSGNSFVGFIRDEYTTLPEDGNRPLFVYLNISWQYENTNDSYASDPARYVAAEQVRDLASTVFHELETPSIQNLIYHIGCRILARFPQLTDVSFQSQNHTWDTVVEEIPGSKGKVYTEPRPPYGFQHFTVTREDAEKEKQKAAEKCRSLKA

SEQ ID NO: 300 - protein, 221 aa, Bacillus subtilis
MKKFVSILFMFGLVMGFSQFQSSTAFAADKVVHETIIVPKNTTYDGKGQRFVAGKELGDGSQSENQDPVFRVEDGATLKNVVLGAPAADGVHTYGNVNIQNVKWEDVGEDALTVKKEGKVTIDGGSAQKASDKIFQINKASTFTVKNFTADNGGKFIRQLGGSTFHVDVIIDKCTITNMKEAIFRTDSKTSTVRMTNTRYSNVGQKWIGVQHIYENNNTQF

SEQ ID NO: 301 - protein, 112 aa, Bacillus subtilis
MKKKKMSPLFRRLNYFSPIEHHSNKHSQTTREDRDWENVYRNRWQYDKVVRSTHGVNCTGSCSWNIYVKNGIVTWEGQNLNYPSTGPDMPDFEPRGCPRGPVFHGISTARSV

SEQ ID NO: 302 - protein, 43 aa, Bacillus subtilis
MKKAVIVENKGCATCSIGAACLVDGPIPDFEIAGATGLFGLWG

SEQ ID NO: 303 - protein, 448 aa, Bacillus subtilis
MFIEQMFPFINESVRVHQLPEGGVLEIDYLRDNVSISDFEYLDLNKTAYELCMRMDGQKTAEQILAEQCAVYDESPEDHKDWYYDMLNMLQNKQVIQLGNRASRHTITTSGSNEFPMPLHATFELTHRCNLKCAHCYLESSPEALGTVSIEQFKKTADMLFDNGVLTCEITGGEIFVHPNANEILDYVCKKFKKVAVLTNGTLMRKESLELLKAYKQKIIVGISLDSVNSEVHDSFRGRKGSFAQTCKTIKLLSDHGIFVRVAMSVFEKNMWEIHDMAQKVRDLGAKAFSYNWVDDFGRGRDIVHPTKDAEQHRKFMEYEQNVIDEFKDLIPIIPYERKRAANCGAGWKSIVISPFGEVRPCALFPKEFSLGNIFHDSYESIFNSPLVHKLWQAQAPRFSEHCMKDKCPFSGYCGGCYLKGLNSNKYHRKNICSWAKNEQLEDVVQLI

SEQ ID NO: 304 - protein, 53 aa, Bacillus subtilis
MSPAQRRILLYILSFIFVIGAVVYFVKSDYLFTLIFIAIAILFGMRARKADSR

SEQ ID NO: 305 - protein, 436 aa, Bacillus subtilis
MNNIIPIMSLLFKQLYSRQGKKDAIRIAAGLVILAVFEIGLIRQAGIDESVLRKTYIILALLLMNAYMVFLSVTSQWKESYMKLSCLLPISSRSFWLAQSVVLFVDTCLRRTLFFFILPLFLFGNGTLSGAQTLFWLGRFSFFTVYSIIFGVVLSNHFVKKKNLMFLLHAAIFACVCISAALMPAATLPLCAVHMLWAVIIDFPVFLQAPPQQSKMHSFMRRSEFSFYKREWNRFISSKAMLLNYAVMAAFSGFFSFQMMNTGIFNQQVVYIVISALLLICSPIALLYSIEKNDRMLLITLPIKRKTMFWAKYRFYSGLLAGGFLLVVMIVGFISGRPISVLTFLQCIELLLAGAFIRLTADEKRPSFSWQTEQQLWSGFSKYRSYLFCLPLFLATLAGTAVSLAVIPIAGLVIVYYLQKQDGGFFDTSKRERLGS
